(19) United States
(12) Patent Application Publication
(10) Pub. No.: US 2020/0370042 A1
(43) Pub. Date: Nov. 26, 2020

(54) COMPOSITIONS AND METHODS FOR CORRECTING DYSTROPHIN MUTATIONS IN HUMAN CARDIOMYOCYTES

(71) Applicant: The Board of Regents of the University of Texas System, Austin, TX (US)

(72) Inventors: Eric N. OLSON, Dallas, TX (US); Chengzu LONG, New York, NY (US)

(73) Assignee: The Board of Regents of the University of Texas System, Austin, TX (US)

(21) Appl. No.: 16/966,274

(22) PCT Filed: Jan. 31, 2019
(86) PCT No.: PCT/US2019/015988

§ 371 Date: Jul. 30, 2020

Related U.S. Application Data
(60) Provisional application No. 62/624,748, filed on Jan. 31, 2018.

(51) Int. Cl. C12N 15/11; C12N 9/22; C12N 7/00; C12N 15/86; C12N 5/10; C12N 5/077; A61P 21/00; A61K 35/34; C12N 5/074

(52) U.S. Cl. CPC C12N 15/11; C12N 2330/51; C12N 7/00; C12N 15/86; C12N 5/10; C12N 5/0657; A61P 21/00; A61K 35/34; C12N 5/0696; C12N 2310/20; C12N 2800/80; C12N 2750/14143; C12N 2510/00; C12N 2506/45; C12N 9/22

(57) ABSTRACT

The disclosure provides a method for treating or preventing Duchene Muscular Dystrophy (DMD) in a subject in need thereof, the method comprising administering to the subject a Cas9 nuclease or a sequence encoding a Cas9 nuclease, and a gRNA or a sequence encoding a gRNA, wherein the gRNA targets a splice donor or splice acceptor site of the dystrophin gene. The administering restores dystrophin expression in at least a subset of the subjects cardiomyocytes, and may at least partially or fully restore cardiac contractility.

### CROSS-REFERENCE TO RELATED APPLICATIONS

[0001] This application claims priority to U.S. Provisional Application Ser. No. 62/624,748, filed Jan. 31, 2018, which is incorporated by reference herein in its entirety for all purposes.

### FEDERAL FUNDING SUPPORT CLAUSE

[0002] This invention was made with government support under grants no. HL-130253, HL-077439, DK-099653, and AR-067294 awarded by the National Institutes of Health (NIH). The government has certain rights in the invention.

### SEQUENCE LISTING

[0003] The instant application contains a Sequence Listing which has been submitted electronically in ASCII format and is hereby incorporated by reference in its entirety. Said ASCII copy, created on Jan. 31, 2019, is named UTFDP0002WO.txt and is 1,722,119 bytes in size.

### FIELD OF THE DISCLOSURE

[0004] The present disclosure relates to the fields of molecular biology, medicine and genetics. More particularly, the disclosure relates to compositions and uses thereof for genome editing to correct mutations in vivo using an exon-skipping approach.

### BACKGROUND

[0005] Muscular dystrophies (MD) are a group of more than 30 genetic diseases characterized by progressive weakness and degeneration of the skeletal muscles that control movement. Duchenne muscular dystrophy (DMD) is one of the most severe forms of MD that affects approximately 1 in 5000 boys and is characterized by progressive muscle weakness and premature death. Cardiomyopathy and heart failure are common, incurable and lethal features of DMD. The disease is caused by mutations in the gene encoding dystrophin (DMD), a large intracellular protein that links the dystroglycan complex at the cell surface with the underlying cytoskeleton, thereby maintaining integrity of the muscle cell membrane during contraction. Mutations in the dystrophin gene result in loss of expression of dystrophin, causing muscle membrane fragility and progressive muscle wasting.

### SUMMARY

[0006] Genomic editing with CRISPR/Cas9 is a promising new approach for correcting or mitigating disease-causing mutations. Duchenne muscular dystrophy (DMD) is associated with lethal degeneration of cardiac and skeletal muscle caused by more than 3000 different mutations in the X-linked dystrophin gene (DMD). Most of these mutations are clustered in “hotspots.” As described in the Examples herein, a screen was performed for optimal guide RNAs capable of introducing insertion/deletion (indel) mutations by nonhomologous end joining that abolish conserved RNA splice sites in 12 exons that potentially allow skipping of the most common mutant or out-of-frame DMD exons within or nearby mutational hotspots. The correction of DMD mutations by exon skipping is referred to herein as “myoediting.” In proof-of-concept studies, myoediting was performed in representative induced pluripotent stem cells from multiple patients with large deletions, point mutations, or duplications within the DMD gene and efficiently restored dystrophin protein expression in derivative cardiomyocytes. In three-dimensional engineered heart muscle (EHM), myoediting of DMD mutations restored dystrophin expression and the corresponding mechanical force of contraction. Correcting only a subset of cardiomyocytes (30 to 50%) was sufficient to rescue the mutant EHM phenotype to near-normal control levels. Thus, it is shown that abolishing conserved RNA splicing acceptor/donor sites and directing the splicing machinery to skip mutant or out-of-frame exons through myoediting allows correction of the cardiac abnormalities associated with DMD by eliminating the underlying genetic basis of the disease.

[0007] Thus, in some embodiments, the disclosure provides a method for editing a mutant dystrophin gene in a cardiomyocyte, the method comprising contacting the cardiomyocyte with a Cas9 nuclease or a sequence encoding a Cas9 nuclease, and a gRNA or a sequence encoding a gRNA, wherein the gRNA targets a splice donor or splice acceptor site of the dystrophin gene.

[0008] The disclosure also provides a method for treating or preventing Duchene Muscular Dystrophy (DMD) in a subject in need thereof, the method comprising administering to the subject a Cas9 nuclease or a sequence encoding a Cas9 nuclease, and a gRNA or a sequence encoding a gRNA, wherein the gRNA targets a splice donor or splice acceptor site of the dystrophin gene; wherein the administering restores dystrophin expression in at least 10% of the subject's cardiomyocytes.

[0009] The disclosure also provides a method for treating or preventing Duchene Muscular Dystrophy (DMD) in a subject in need thereof, the method comprising contacting an induced pluripotent stem cell (iPSC) with a Cas9 nuclease or a sequence encoding a Cas9 nuclease, and a gRNA, or a sequence encoding a gRNA, wherein the gRNA targets a splice donor or splice acceptor site of the dystrophin gene; differentiating the iPSC into a cardiomyocyte; and administering the cardiomyocyte to a the subject.

[0010] Also provided is a cell (such as an induced pluripotent stem cell (iPSC) or cardiomyocyte) produced according to the methods of the disclosure, and compositions thereof. In some embodiments, the cell expresses a dystrophin protein.

[0011] Also provided is an induced pluripotent stem cell (iPSC) comprising a Cas9 nuclease, or a sequence encoding a Cas9 nuclease, and a gRNA, or a sequence encoding a gRNA, wherein the gRNA targets a splice donor or splice acceptor site of the dystrophin gene.

[0012] As used in the specification, “a” or “an” may mean one or more. As used in the claim(s), when used in conjunction with the word “comprising”, the words “a” or “an” may mean one or more than one.

[0013] The use of the term “or” in the claims is used to mean “and/or” unless explicitly indicated to refer to alternatives only or the alternatives are mutually exclusive, although the disclosure supports a definition that refers to only alternatives and “and/or.” As used herein “another” may mean at least a second or more.

[0014] Throughout this application, the term “about” is used to indicate that a value includes the inherent variation of error for the device, for the method being employed to determine the value, or that exists among the study subjects. Such an inherent variation may be a variation of ±10% of the stated value.

[0015] Throughout this application, nucleotide sequences are listed in the 5′ to 3′ direction, and amino acid sequences are listed in the N-terminal to C-terminal direction, unless indicated otherwise.

[0016] Other objects, features and advantages of the present invention will become apparent from the following detailed description. It should be understood, however, that the detailed description and the specific examples, while indicating preferred embodiments of the invention, are given by way of illustration only, since various changes and modifications within the spirit and scope of the invention will become apparent to those skilled in the art from this detailed description.

### BRIEF DESCRIPTION OF THE DRAWINGS

[0017] The following drawings form part of the present specification and are included to further demonstrate certain aspects of the present disclosure. The disclosure may be better understood by reference to one or more of these drawings in combination with the detailed description of specific embodiments presented herein.

[0018] FIG. 1A-1C. Myoediting strategy and identification of optimal guide RNAs to target the top 12 exons in DMD. (FIG. 1A) Conserved splice sites contain multiple NAG and NGG sequences, which enable cleavage by SpCas9. The numbers indicate the frequency of occurrence (%). (FIG. 1B) Human DMD exon structure. Shapes of intron-exon junctions indicate complementarity that maintains the open reading frame upon splicing. Red arrowheads indicate the top 12 targeted exons. The numbers indicate the order of the exons. (FIG. 1C) T7E1 assays in human 293 cells transfected with plasmids expressing the corresponding guide RNA (gRNA), SpCas9, and GFP for the top 12 exons. The PCR products from GFP+ and GFP− cells were cut with T7 endonuclease I (T7E1), which is specific to heteroduplex DNA caused by CRISPR/Cas9-mediated genome editing. Red arrowhead indicates cleavage bands of T7E1. M denotes size marker lane. bp indicates the base pair length of the marker bands.

[0019] FIG. 2A-2J. Rescue of dystrophin mRNA expression in iPSC-derived cardiomyocytes with diverse mutations by myoediting. (FIG. 2A) Schematic of the myoediting of DMD iPSCs and 3D-EHMs-based functional assay. (FIG. 2B) Myoediting targets the exon 51 splice acceptor site in Del DMD iPSCs. A deletion (exons 48 to 50) in a DMD patient creates a frameshift mutation in exon 51. The red box indicates out-of-frame exon 51 with a stop codon. Destruction of the exon 51 splice acceptor in DMD iPSCs allows splicing from exons 47 to 52 and restoration of the dystrophin open reading frame. (FIG. 2C) Using the guide RNA library, three guide RNAs (Ex51-g1, Ex51-g2, and Ex51-g3) that target sequences 5′ of exon 51 were selected. FIG. 2C discloses SEQ ID NO: 2481. (FIG. 2D) RT-PCR of cardiomyocytes differentiated from uncorrected DMD (Del), corrected DMD iPSCs (Del-Cor.), and WT. Skipping of exon 51 allows splicing from exons 47 to 52 (lower band) and restoration of the DMD open reading frame. (FIG. 2E) Myoediting strategy for pseudo-exon 47A (pEx). DMD exons are represented as blue boxes. Pseudo-exon 47A (red) with stop codon is marked by a stop sign. The black box indicates myoediting-mediated indel. (FIG. 2F) Sequence of guide RNAs for pseudo-exon 47A of pEx. DMD exons are represented as blue boxes, and pseudo-exons are represented as red boxes (47A). sgRNA, single-guide RNA. FIG. 2F discloses SEQ ID NOS 2482-2484, respectively, in order of appearance. (FIG. 2G) RT-PCR of human cardiomyocytes differentiated from WT, uncorrected DMD (pEx), and corrected DMD iPSCs (pEx-Cor.) by guide RNAs In47A-g1 and In47A-g2. Skipping of pseudo-exon 47A allows splicing from exons 47 to 48 (lower band) and restoration of the DMD open reading frame. (FIG. 2H) Myoediting strategy for the duplication (Dup) of exons 55 to 59. DMD exons are represented as blue boxes. Duplicated exons are represented as red boxes. The black box indicates myoediting-mediated indel. (FIG. 2I) Sequence of guide RNAs for intron 54 of Dup (In54-g1, In54-g2, and In54-g3). FIG. 2I discloses SEQ ID NOS 2485-2487, respectively, in order of appearance. (FIG. 2J) RT-PCR of human cardiomyocytes differentiated from WT, uncorrected DMD (Dup), and corrected DMD iPSCs (Dup-Cor.). Skipping of duplicated exons 55 to 59 allows splicing from exons 54 to 55 and restoration of the DMD open reading frame. RT-PCR of RNA was performed with the indicated sets of primers (F and R) (Table 4).

[0020] FIG. 3A-3F. Immunocytochemistry and Western blot analysis show dystrophin protein expression rescued by myoediting. (FIG. 3A to 3C) Immunocytochemistry of dystrophin expression (green) shows DMD iPSC cardiomyocytes lacking dystrophin expression. Following successful myoediting, the corrected DMD iPSC cardiomyocytes express dystrophin. Immunofluorescence (red) detects cardiac marker troponin-I. Nuclei are labeled by Hoechst dye (blue). (FIG. 3D to 3F) Western blot analysis of WT (100 and 50%), uncorrected (Del, pEx, and Dup) and corrected DMD (Del-Cor #27, pEx-Cor #19, and Dup-Cor #6.) iCM. Red arrowhead (above 250 kD) indicates the immunoreactive bands of dystrophin. Blue arrowhead (above 150 kD) indicates the immunoreactive bands of MyHC loading controls. kD indicates protein molecular weight. Scale bar, 100 mm.

[0021] FIG. 4A-4F. Rescued DMD cardiomyocyte-derived EHM showed enhanced FOC (force of contraction). (FIG. 4A) Experimental setup for EHM preparation, culture, and analysis of contractile function. (FIG. 4B to 4D) Contractile dysfunction in DMD EHM can be rescued by myoediting. FOC normalized to muscle content of each individual EHM in response to increasing extracellular calcium concentrations; n=8/8/6/4/6/6/4/4; *P<0.05 by two-way analysis of variance (ANOVA) and Tukey's multiple comparison test. WT EHM data are pooled from parallel experiments with indicated DMD lines and applied to FIG. 4 (B to D). (FIG. 4E) Maximal cardiomyocyte FOC normalized to WT. n=8/8/6/4/6/6/4/4; *P<0.05 by one-way ANOVA and Tukey's multiple comparison test. (FIG. 4F) Titration of corrected cardiomyocytes revealed that 30% of cardio-myocytes needed to be repaired to partially rescue the phenotype, and 50% of cardiomyocytes needed to be repaired to fully rescue the phenotype (100% Del-Cor.) in EHMs. WT, Del, and 100% Del-Cor. are pooled data, as displayed in FIG. 4.

[0022] FIG. 5A-5B. Genome editing of DMD top 12 exons by CRISPR/Cas9. (FIG. 5A) DNA sequences of DMD top 12 exons (51, 45, 53, 44, 46, 52, 50, 43, 6, 7, 8 and 55) from GPF+ human 293 cells edited by SpCas9 using the corresponding guide RNAs (Table 5). PCR products from genomic DNA of each sample were subcloned into pCRII-TOPO vector and individual clones were picked and sequenced. Unedited wild type (WT) sequences are on the top and representative edited sequences are on the bottom. Deleted sequences are replaced by black dashes. Red lower case letters (ag) indicate the splice acceptor sites (SA, 3′ end of the intron). Blue lower case letters (gt) indicate the splice donor sites (SD, 5′ end of the intron). FIG. 5A discloses SEQ ID NOS 2488-2526 in the left column and SEQ ID NOS 2427-2546 in the right column, all respectively, in order of appearance. (FIG. 5B) RT-PCR of RNA from edited 293 cells indicate deletion of targeted DMD Dp140 isoform exons (51, 53, 46, 52, 50 and 55). Black arrows indicate the RT-PCR products with exon deletions. M denotes size marker lane. bp indicates the length of the marker bands. Sequence of the RT-PCR products of exon deletion bands contained the two flanking exons, but skipped the targeted exon. For example, sequence of the RT-PCR products of ΔEx51 band confirmed that exon 50 spliced directly to exon 52, excluding exon 51. FIG. 5B discloses “GAGCCTGCAACA” as SEQ ID NO: 2547, “ATCGAACAGTTG” as SEQ ID NO: 2548, “AAAGAGTTACTG” as SEQ ID NO: 2549, “CAGAAGTTGAAA” as SEQ ID NO: 2550, “GTGAAGCTCCTA” as SEQ ID NO: 2551 and “TAAAAGGACCTC” as SEQ ID NO: 2552.

[0023] FIG. 6A-6D. Correction of a large deletion mutation (Del. Ex47-50) in DMD iPSCs and iPSC-derived cardiomyocytes. (FIG. 6A) T7E1 assay using human 293 cells transfected with plasmid expressing SpCas9, gRNAs (Ex51-g1, g2 and g3), and GFP show genome cleavage at DMD exon 51. Red arrowheads point to cleavage products. M, marker; bp, base pair. (FIG. 6B) DNA sequences of DMD exon 51 from GPF+ DMD Del iPSCs edited by SpCas9 and the guide RNA Ex51 g3. PCR products from genomic DNA of a mixture of myoedited DMD iPSCs were subcloned into pCRII-TOPO vector and sequenced as described above. Uncorrected exon51 sequence is on the top and representative edited sequences are on the bottom. Deleted sequences are replaced by black dashes. Red lower-case letters (ag) indicate the splice acceptor sites. The number of deleted nucleotides is indicated by (-). FIG. 6B discloses SEQ ID NOS 2553-2561, respectively, in order of appearance. (FIG. 6C) Sequence of the lower RT-PCR band from FIG. 2D (Del-Cor. lane) confirms skipping of exon 51, which reframed the DMD ORF (dystrophin transcript from exons 47 to 52). FIG. 6C discloses SEQ ID NO: 2562. (FIG. 6D) Immunocytochemistry shows dystrophin expression in iPSC-derived cardiomyocyte mixtures (Del-Cor.) and single colony (Del-Cor-SC) following SpCas9-mediated exon skipping with guide RNA Ex51-g3 compared to WT and uncorrected cardiomyocyte (Del). Green, dystrophin staining; red, troponin I staining; blue, nuclei staining. Scale bar=100 μm.

[0024] FIG. 7A-7D. Correction of a pseudo-exon mutation (pEx47A) in DMD iPSCs and iPSC-derived cardiomyocytes. (FIG. 7A) T7E1 assay using DMD pEx47A iPSCs nucleofected with vector expressing SpCas9, gRNAs (pEx47A-g1 and g2), and GFP show genome cleavage at DMD pseudo-exon 47A. Red arrowheads point to cleavage products. M, marker; bp, base pair. (FIG. 7B) DNA sequences of DMD pseudo-exon 47A from GPF+ DMD Del iPSCs edited by SpCas9 and the guide RNA pEx47A-g1 and g2. PCR products from genomic DNA of a mixture of myoedited DMD iPSCs were subcloned and sequenced as described above. Uncorrected pseudo-exon 47A sequence is on the top and representative edited sequences are on the bottom. Deleted sequences are replaced by black dashes. Red lower case letter (g) indicate point mutation in the cryptic splice acceptor site. The number of deleted nucleotides is indicated by (-). FIG. 7B discloses SEQ ID NOS 2563-2567, respectively, in order of appearance. (FIG. 7C) Sequence of the lower RT-PCR bands from FIG. 2G (pEx and pEx-Cor. lanes) confirms skipping of pseudo-exon 47A, which reframed the DMD ORF (dystrophin transcript from exons 47 to 48). FIG. 7C discloses SEQ ID NOS 2568-2569, respectively, in order of appearance. (FIG. 7D) Immunocytochemistry shows dystrophin expression in iPSC-derived cardiomyocyte mixtures (pEx-Cor.) and single colony (pEx-Cor-SC) following SpCas9-mediated exon skipping with guide RNA pEx47A-g2 compared to WT and uncorrected cardiomyocyte (pEx). Green, dystrophin staining; red, troponin I staining; blue, nuclei staining. Scale bar=100 μm.

[0025] FIG. 8A-8E. Correction of a large duplication mutation (Dup. Ex55-59) in DMD iPSCs and iPSC-derived cardiomyocytes. (FIG. 8A) This insertion site (In59-In54 junction) was confirmed by PCR using a forward primer targeting intron 59 (F2) and a reverse primer targeting intron 54 (F1) (FIG. 2H and Table 4). The duplication-specific PCR band was absent in WT cells and was presented in Dup cells. (FIG. 8B) T7E1 assays using 293 cells with vector expressing SpCas9, gRNAs (In54-g1, g2 and g3), and GFP show genome cleavage at DMD intron 54. Red arrowheads point to cleavage products. M, marker; bp, base pair. (FIG. 8C) mRNA with duplicated exons was semi-quantified by RT-PCR using the primers flanking the duplication borders exon 53 and exon 55 (Ex53F, a forward primer in exon 53 and Ex59R, a reverse primer in exon 59). Similarly, duplicated exons was semi-quantified by RT-PCR using the primers flanking the duplication borders exon 59 and exon 60 (Ex59F, a forward primer in exon 59 and Ex60R, a reverse primer in exon 60). The duplication-specific RT-PCR upper bands (red arrowhead) were absent in WT cells and were decreased dramatically in Dup-Cor. cells. (FIG. 8D) PCR results of three representative corrected single colonies (Dup-Cor-SC #4, 6 and 26) and the uncorrected control (Dup). The absence of a duplication-specific PCR band (F2-R1) in colonies 4, 6 and 26 confirmed the deletion of the duplicated DNA region. M denotes size marker lane. bp indicates the length of the marker bands. (FIG. 8E) Immunocytochemistry shows dystrophin expression in iPSC-derived cardiomyocyte mixtures (Dup-Cor.) and single colony (Dup-Cor-SC #6) following SpCas9-mediated exon skipping with guide RNA In54-g1 compared to WT and uncorrected cardiomyocyte (Dup). Green, dystrophin staining; red, troponin I staining; blue, nuclei staining. Scale bar=100 μm.

### DETAILED DESCRIPTION

[0026] DMD is a new mutation syndrome with more than 4,000 independent mutations that have been identified in humans (world-wide web at dmd.nl). The majority of patient mutations include deletions that cluster in a hotspot, and thus a therapeutic approach for skipping certain exon applies to large group of patients. The rationale of the exon skipping approach is based on the genetic difference between DMD and Becker muscular dystrophy (BMD) patients. In DMD patients, the reading frame of dystrophin mRNA is disrupted resulting in prematurely truncated, non-functional dystrophin proteins. BMD patients have mutations in the DMD gene that maintain the reading frame allowing the production of internally deleted, but partially functional dystrophins leading to much milder disease symptoms compared to DMD patients.

[0027] Duchenne muscular dystrophy (DMD) afflicts ˜1 in 5000 males and is caused by mutations in the X-linked dystrophin gene (DMD). These mutations include large deletions, large duplications, point mutations, and other small mutations. The rod-shaped dystrophin protein links the cytoskeleton and the extracellular matrix of muscle cells and maintains the integrity of the plasma membrane. In its absence, muscle cells degenerate. Although DMD causes many severe symptoms, dilated cardiomyopathy is a leading cause of death of DMD patients.

[0028] CRISPR (clustered regularly interspaced short palindromic repeats)/Cas9 (CRISPR-associated protein 9)-mediated genome editing is emerging as a promising tool for correction of genetic disorders. Briefly, an engineered RNA-guided nuclease, such as Cas9 or Cpf1, generates a double-strand break (DSB) at the targeted genomic locus adjacent to a short protospacer adjacent motif (PAM) sequence. There are three primary pathways to repair the DSB: (i) Nonhomologous end joining (NHEJ) directly ligates two DNA ends and leads to imprecise insertion/deletion (indel) mutations. (ii) Homology-directed repair (HDR) uses sister chromatid or exogenous DNA as a repair template and generates a precise modification at the target sites. (iii) Microhomology-mediated end joining (MMEJ) uses short sequences of nucleotide homology (5 to 25 base pairs) flanking the original DSB to ligate the broken ends and deletes the region between the microhomologies. Although NHEJ can effectively generate indel mutations in most cell types, HDR- or MMEJ-mediated editing is generally thought to be restricted to proliferating cells.

[0029] Internal in-frame deletions of dystrophin are associated with Becker muscular dystrophy (BMD), a relatively mild form of muscular dystrophy. Inspired by the attenuated clinical severity of BMD versus DMD, exon skipping has been advanced as a therapeutic strategy to bypass mutations that disrupt the dystrophin open reading frame by modulating splicing patterns of the DMD gene. Several recent studies used CRISPR/Cas9-mediated genome editing to correct various types of DMD mutations in human cells and mice. Some have deployed pairs of guide RNAs to correct the mutation, which requires simultaneous cutting of DNA and excision of large intervening genomic sequences (23 to 725 kb). Fortuitously, the PAM sequence for Streptococcus pyogenes Cas9 (SpCas9), the first and most widely used form of Cas9, contains NAG or NGG, corresponding to the universal splice acceptor sequence (AG) and most of the donor sequences (GG). Thus, in principle, directing Cas9 to splice junctions and the elimination of these consensus sequences by indels can allow for efficient exon skipping. In addition, only a single cleavage of DNA, which disrupts the splice site, can enable skipping of an entire exon.

[0030] Given the thousands of individual DMD mutations that have been identified in humans, an obvious question is how such a large number of mutations might be corrected by CRISPR/Cas9-mediated genome editing. Human DMD mutations are clustered in specific “hotspot” areas of the gene (exons 45 to 55 and exons 2 to 10) such that skipping 1 or 2 of 12 targeted exons within or nearby the hotspots (termed “top 12 exons”) can, in principle, rescue dystrophin function in a majority (˜60%) of DMD patients. Here, CRISPR/Cas9 is used with single-guide RNAs to destroy the conserved splice acceptor or donor sites preceding DMD mutations or to bypass mutant or out-of-frame exons, thereby allowing splicing between surrounding exons to recreate in-frame dystrophin proteins lacking the mutations. This approach was first tested by screening for optimal guide RNAs capable of inducing skipping of the DMD 12 exons that would potentially allow skipping of the most commonly mutated or out-of-frame exons within nearby mutational hotspots. As examples of this approach, the restoration of dystrophin expression is demonstrated in induced pluripotent stem cell (iPSC)-derived cardiomyocytes harboring exon deletions and a pseudo-exon point mutation. Finally, human iPSC-derived three-dimensional (3D) engineered heart muscle (EHM) was used to test the efficacy of gene editing to overcome abnormalities in cardiac contractility associated with DMD. Contractile dysfunction was observed in DMD EHM, recapitulating the dilated cardiomyopathy (DCM) clinical phenotype of DMD patients, and contractile function was effectively restored in corrected DMD EHM. Thus, genome editing represents a powerful means of eliminating the genetic cause and correcting the muscle and cardiac abnormalities associated with DMD.

[0031] These and other aspects of the disclosure are described in further detail below.

### CRISPR Systems

[0032] CRISPRs (clustered regularly interspaced short palindromic repeats) are DNA loci containing short repetitions of base sequences. Each repetition is followed by short segments of “spacer DNA” from previous exposures to a virus. CRISPRs are found in approximately 40% of sequenced eubacteria genomes and 90% of sequenced archaea. CRISPRs are often associated with Cas genes that code for proteins related to CRISPRs. The CRISPR/Cas system is a prokaryotic immune system that confers resistance to foreign genetic elements such as plasmids and phages and provides a form of acquired immunity. CRISPR spacers recognize and silence these exogenous genetic elements like RNAi in eukaryotic organisms.

[0033] CRISPR repeats range in size from 24 to 48 base pairs. They usually show some dyad symmetry, implying the formation of a secondary structure such as a hairpin, but are not truly palindromic. Repeats are separated by spacers of similar length. Some CRISPR spacer sequences exactly match sequences from plasmids and phages, although some spacers match the prokaryote's genome (self-targeting spacers). New spacers can be added rapidly in response to phage infection.

[0034] Guide RNA (gRNA).

[0035] As an RNA guided protein, Cas9 requires a short RNA to direct the recognition of DNA targets. Though Cas9 preferentially interrogates DNA sequences containing a PAM sequence NGG it can bind here without a protospacer target. However, the Cas9-gRNA complex requires a close match to the gRNA to create a double strand break. CRISPR sequences in bacteria are expressed in multiple RNAs and then processed to create guide strands for RNA. Because Eukaryotic systems lack some of the proteins required to process CRISPR RNAs the synthetic construct gRNA was created to combine the essential pieces of RNA for Cas9 targeting into a single RNA expressed with the RNA polymerase type III promoter U6. Synthetic gRNAs are slightly over 100 bp at the minimum length and contain a portion which is targets the 20 protospacer nucleotides immediately preceding the PAM sequence NGG; gRNAs do not contain a PAM sequence.

[0036] In some embodiments, the gRNA targets a site within a wildtype dystrophin gene. An exemplary wildtype dystrophin gene includes the human sequence (see GenBank Accession NO. NC_000023.11), located on the human X chromosome, which codes for the protein dystrophin (GenBank Accession No. AAA53189; SEQ ID NO: 5), the sequence of which is reproduced below:

| | |
|---|---|
| 1 | MLWWEEVEDC YEREDVQKKT FTKWVNAQFS KFGKQHIENL FSDLQDGRRL LDLLEGLTGQ |
| 61 | KLPKEKGSTR VHALNNVNKA LRVLQNNNVD LVNIGSTDIV DGNHKLTLGL IWNIILHWQV |
| 121 | KNVMKNIMAG LQQTNSEKIL LSWVRQSTRN YPQVNVINFT TSWSDGLALN ALIHSHRPDL |
| 181 | FDWNSVVCQQ SATQRLEHAF NIARYQLGIE KLLDPEDVDT TYPDKKSILM YITSLFQVLP |
| 241 | QQVSIEAIQE VEMLPRPPKV TKEEHFQLHH QMHYSQQITV SLAQGYERTS SPKPRFKSYA |
| 301 | YTQAAYVTTS DPTRSPFPSQ HLEAPEDKSF GSSLMESEVN LDRYQTALEE VLSWLLSAED |
| 361 | TLQAQGEISN DVEVVKDQFH THEGYMMDLT AHQGRVGNIL QLGSKLIGTG KLSEDEETEV |
| 421 | QEQMNLLNSR WECLRVASME KQSNLHRVLM DLQNQKLKEL NDWLTKTEER TRKMEEEPLG |
| 481 | PDLEDLKRQV QQHKVLQEDL EQEQVRVNSL THMVVVVDES SGDHATAALE EQLKVLGDRW |
| 541 | ANICRWTEDR WVLLQDILLK WQRLTEEQCL FSAWLSEKED AVNKIHTTGF KDQNEMLSSL |
| 601 | QKLAVLKADL EKKKQSMGKL YSLKQDLLST LKNKSVTQKT EAWLDNFARC WDNLVQKLEK |
| 661 | STAQISQAVT TTQPSLTQTT VMETVTTVTT REQILVKHAQ EELPPPPPQK KRQITVDSEI |
| 721 | RKRLDVDITE LHSWITRSEA VLQSPEFAIF RKEGNFSDLK EKVNAIEREK AEKFRKLQDA |
| 781 | SRSAQALVEQ MVNEGVNADS IKQASEQLNS RWIEFCQLLS ERLNWLEYQN NIIAFYNQLQ |
| 841 | QLEQMTTTAE NWLKIQPTTP SEPTAIKSQL KICKDEVNRL SGLQPQIERL KIQSIALKEK |
| 901 | GQGPMFLDAD FVAFTNHFKQ VFSDVQAREK ELQTIFDTLP PMRYQETMSA IRTWVQQSET |
| 961 | KLSIPQLSVT DYEIMEQRLG ELQALQSSLQ EQQSGLYYLS TTVKEMSKKA PSEISRKYQS |
| 1021 | EFEEIEGRWK KLSSQLVEHC QKLEEQMNKL RKIQNHIQTL KKWMAEVDVF LKEEWPALGD |
| 1081 | SEILKKQLKQ CRLLVSDIQT IQPSLNSVNE GGQKIKNEAE PEFASRLETE LKELNTQWDH |
| 1141 | MCQQVYARKE ALKGGLEKTV SLQKDLSEMH EWMTQAEEEY LERDFEYKTP DELQKAVEEM |
| 1201 | KRAKEEAQQK EAKVKLLTES VNSVIAQAPP VAQEALKKEL ETLTTNYQWL CTRLNGKCKT |
| 1261 | LEEVWACWHE LLSYLEKANK WLNEVEFKLK TTENIPGGAE EISEVLDSLE NLMRHSEDNP |
| 1321 | NQIRILAQTL TDGGVMDELI NEELETFNSR WRELHEEAVR RQKLLEQSIQ SAQETEKSLH |
| 1381 | LIQESLTFID KQLAAYIADK VDAAQMPQEA QKIQSDLTSH EISLEEMKKH NQGKEAAQRV |
| 1441 | LSQIDVAQKK LQDVSMKFRL FQKPANFELR LQESKMILDE VKMHLPALET KSVEQEVVQS |
| 1501 | QLNHCVNLYK SLSEVKSEVE MVIKTGRQIV QKKQTENPKE LDERVTALKL HYNELGAKVT |
| 1561 | ERKQQLEKCL KLSRKMRKEM NVLTEWLAAT DMELTKRSAV EGMPSNLDSE VAWGKATQKE |
| 1621 | IEKQKVHLKS ITEVGEALKT VLGKKETLVE DKLSLLNSNW IAVTSRAEEW LNLLLEYQKH |
| 1681 | METFDQNVDH ITKWIIQADT LLDESEKKKP QQKEDVLKRL KAELNDIRPK VDSTRDQAAN |
| 1741 | LMANRGDHCR KLVEPQISEL NHRFAAISHR IKTGKASIPL KELEQFNSDI QKLLEPLEAE |
| 1801 | IQQGVNLKEE DFNKDMNEDN EGTVKELLQR GDNLQQRITD ERKREEIKIK QQLLQTKHNA |
| 1861 | LKDLRSQRRK KALEISHQWY QYKRQADDLL KCLDDIEKKL ASLPEPRDER KIKEIDRELQ |
| 1921 | KKKEELNAVR RQAEGLSEDG AAMAVEPTQI QLSKRWREIE SKFAQFRRLN FAQIHTVREE |
| 1981 | TMMVMTEDMP LEISYVPSTY LTEITHVSQA LLEVEQLLNA PDLCAKDFED LFKQEESLKN |
| 2041 | IKDSLQQSSG RIDIIHSKKT AALQSATPVE RVKLQEALSQ LDFQWEKVNK MYKDRQGRFD |
| 2101 | RSVEKWRRFH YDIKIFNQWL TEAEQFLRKT QIPENWEHAK YKWYLKELQD GIGQRQTVVR |
| 2161 | TLNATGEEII QQSSKTDASI LQEKLGSLNL RWQEVCKQLS DRKKRLEEQK NILSEFQRDL |
| 2221 | NEFVLWLEEA DNIASIPLEP GKEQQLKEKL EQVKLLVEEL PLRQGILKQL NETGGPVLVS |
| 2281 | APISPEEQDK LENKLKQTNL QWIKVSRALP EKQGEIEAQI KDLGQLEKKL EDLEEQLNHL |
| 2341 | LLWLSPIRNQ LEIYNQPNQE GPFDVQETEI AVQAKQPDVE EILSKGQHLY KEKPATQPVK |
| 2401 | RKLEDLSSEW KAVNRLLQEL RAKQPDLAPG LTTIGASPTQ TVTLVTQPVV TKETAISKLE |
| 2461 | MPSSLMLEVP ALADFNRAWT ELTDWLSLLD QVIKSQRVMV GDLEDINEMI IKQKATMQDL |
| 2521 | EQRRPQLEEL ITAAQNLKNK TSNQEARTII TDRIERIQNQ WDEVQEHLQN RRQQLNEMLK |
| 2581 | DSTQWLEAKE EAEQVLGQAR AKLESWKEGP YTVDAIQKKI TETKQLAKDL RQWQTNVDVA |
| 2641 | NDLALKLLRD YSADDTRKVH MITENINASW RSIHKRVSER EAALEETHRL LQQFPLDLEK |
| 2701 | FLAWLTEAET TANVLQDATR KERLLEDSKG VKELMKQWQD LQGEIEAHTD VYHNLDENSQ |
| 2761 | KILRSLEGSD DAVLLQRRLD NMNFKWSELR KKSLNIRSHL EASSDQWKRL HLSLQELLVW |
| 2821 | LQLKDDELSR QAPIGGDFPA VQKQNDVHRA FKRELKTKEP VIMSTLETVR IFLTEQPLEG |
| 2881 | LEKLYQEPRE LPPEERAQNV TRLLRKQAEE VNTEWEKLNL HSADWQRKID ETLERLQELQ |
| 2941 | EATDELDLKL RQAEVIKGSW QPVGDLLIDS LQDHLEKVKA LRGEIAPLKE NVSHVNDLAR |
| 3001 | QLTTLGIQLS PYNLSTLEDL NTRWKLLQVA VEDRVRQLHE AHRDFGPASQ HFLSTSVQGP |
| 3061 | WERAISPNKV PYYINHETQT TCWDHPKMTE LYQSLADLNN VRFSAYRTAM KLRRLQKALC |
| 3121 | LDLLSLSAAC DALDQHNLKQ NDQPMDILQI INCLTTIYDR LEQEHNNLVN VPLCVDMCLN |
| 3181 | WLLNVYDTGR TGRIRVLSFK TGIISLCKAH LEDKYRYLFK QVASSTGFCD QRRLGLLLHD |
| 3241 | SIQIPRQLGE VASFGGSNIE PSVRSCFQFA NNKPEIEAAL FLDWMRLEPQ SMVWLPVLHR |
| 3301 | VAAAETAKHQ AKCNICKECP IIGFRYRSLK HFNYDICQSC FFSGRVAKGH KMHYPMVEYC |
| 3361 | TPTTSGEDVR DFAKVLKNKF RTKRYFAKHP RMGYLPVQTV LEGDNMETPV TLINFWPVDS |
| 3421 | APASSPQLSH DDTHSRIEHY ASRLAEMENS NGSYLNDSIS PNESIDDEHL LIQHYCQSLN |
| 3481 | QDSPLSQPRS PAQILISLES EERGELERIL ADLEEENRNL QAEYDRLKQQ HEHKGLSPLP |
| 3541 | SPPEMMPTSP QSPRDAELIA EAKLLRQHKG RLEARMQILE DHNKQLESQL HRLRQLLEQP |
| 3601 | QAEAKVNGTT VSSPSTSLQR SDSSQPMLLR VVGSQTSDSM GEEDLLSPPQ DTSTGLEEVM |
| 3661 | EQLNNSFPSS RGRNTPGKPM REDTM. |

[0037] In some embodiments, the gRNA targets a site within a mutant dystrophin gene. In some embodiments, the gRNA targets a dystrophin intron. In some embodiments, the gRNA targets a dystrophin exon. In some embodiments, the gRNA targets a site in a dystrophin exon that is expressed and is present in one or more of the dystrophin isoforms shown in Table 1. In embodiments, the gRNA targets a dystrophin splice site. In some embodiments, the gRNA targets a splice donor site on the dystrophin gene. In embodiments, the gRNA targets a splice acceptor site on the dystrophin gene.

TABLE 1
Dystrophin isoforms

| | | | | Pro- | |
|---|---|---|---|---|---|
| | | Nucleic | | tein | |
| | | Acid | Protein | SEQ | |
| Sequence | Nucleic Acid | SEQ ID | Accession | ID | |
| Name | Accession No. | NO: | No. | NO: | Description |
| DMD | NC_000023.11 | None | None | None | Sequence from Human X Chromosome (at |
| Genomic | (positions | | | | positions Xp21.2 to p21.1) from Assembly |
| Sequence | 31119219 to | | | | GRCh38.p7 (GCF_000001405.33) |
| | 33339609) | | | | |
| Dystrophin | NM_000109.3 | 6 | NP_000100.2 | 7 | Transcript Variant: transcript Dp427c is |
| Dp427c | | | | | expressed predominantly in neurons of the |
| isoform | | | | | cortex and the CA regions of the hippocampus. |
| | | | | | It uses a unique promoter/exon 1 located about |
| | | | | | 130 kb upstream of the Dp427m transcript |
| | | | | | promoter. The transcript includes the common |
| | | | | | exon 2 of transcript Dp427m and has a similar |
| | | | | | length of 14 kb. The Dp427c isoform contains a |
| | | | | | unique N-terminal MED sequence, instead of the |
| | | | | | MLWWEEVEDCY sequence (SEQ ID NO: 2476) of |
| | | | | | isoform Dp427m. The remainder of isoform |
| | | | | | Dp427c is identical to isoform Dp427m. |
| Dystrophin | NM_004006.2 | 8 | NP_003997.1 | 9 | Transcript Variant: transcript Dp427m encodes |
| Dp427m | | | | | the main dystrophin protein found in muscle. |
| isoform | | | | | As a result of alternative promoter use, exon |
| | | | | | 1 encodes a unique N-terminal MLWWEEVEDCY |
| | | | | | (SEQ ID NO: 2476) aa sequence. |
| Dystrophin | NM_004009.3 | 10 | NP_004000.1 | 11 | Transcript Variant: transcript Dp427p1 |
| Dp427p1 | | | | | initiates from a unique promoter/exon 1 |
| isoform | | | | | located in what corresponds to the first |
| | | | | | intron of transcript Dp427m. The transcript |
| | | | | | adds the common exon 2 of Dp427m and has a |
| | | | | | similar length (14 kb). The Dp427p1 isoform |
| | | | | | replaces the MLWWEEVEDCY (SEQ ID NO: 2476)- |
| | | | | | start of Dp427m with a unique N-terminal |
| | | | | | MSEVSSD (SEQ ID NO: 2477) aa sequence. |
| Dystrophin | NM_004011.3 | 12 | NP_004002.2 | 13 | Transcript Variant: transcript Dp260-1 uses |
| Dp260-1 | | | | | exons 30-79, and originates from a |
| isoform | | | | | promoter/exon 1 sequence located in intron 29 |
| | | | | | of the dystrophin gene. As a result, Dp260-1 |
| | | | | | contains a 95 bp exon 1 encoding a unique N- |
| | | | | | terminal 16 aa MTEIILLIFFPAYFLN-sequence (SEQ |
| | | | | | ID NO: 2478) that replaces amino acids 1-1357 |
| | | | | | of the full-length dystrophin product (Dp427m |
| | | | | | isoform). |
| Dystrophin | NM_004012.3 | 14 | NP_004003.1 | 15 | Transcript Variant: transcript Dp260-2 uses |
| Dp260-2 | | | | | exons 30-79, starting from a promoter/exon 1 |
| isoform | | | | | sequence located in intron 29 of the |
| | | | | | dystrophin gene that is alternatively spliced |
| | | | | | and lacks N-terminal amino acids 1-1357 of the |
| | | | | | full length dystrophin (Dp427m isoform). The |
| | | | | | Dp260-2 transcript encodes a unique N-terminal |
| | | | | | MSARKLRNLSYKK sequence (SEQ ID NO: 2479). |
| Dystrophin | NM_004013.2 | 16 | NP_004004.1 | 17 | Transcript Variant: Dp140 transcripts use exons |
| Dp140 | | | | | 45-79, starting at a promoter/exon 1 located in |
| isoform | | | | | intron 44. Dp140 transcripts have a long (1 kb) |
| | | | | | 5′ UTR since translation is initiated in exon |
| | | | | | 51 (corresponding to aa 2461 of dystrophin). In |
| | | | | | addition to the alternative promoter and exon |
| | | | | | 1, differential splicing of exons 71-74 and 78 |
| | | | | | produces at least five Dp140 isoforms. Of |
| | | | | | these, this transcript (Dp140) contains all of |
| | | | | | the exons. |
| Dystrophin | NM_004014.2 | 18 | NP_004005.1 | 19 | Transcript Variant: transcript Dp116 uses exons |
| Dp116 | | | | | 56-79, starting from a promoter/exon 1 within |
| isoform | | | | | intron 55. As a result, the Dp116 isoform |
| | | | | | contains a unique N-terminal MLHRKTYHVK aa |
| | | | | | sequence (SEQ ID NO: 2480), instead of aa 1- |
| | | | | | 2739 of dystrophin. Differential splicing |
| | | | | | produces several Dp116-subtypes. The Dp116 |
| | | | | | isoform is also known as S-dystrophin or apo- |
| | | | | | dystrophin-2. |
| Dystrophin | NM_004015.2 | 20 | NP_004006.1 | 21 | Transcript Variant: Dp71 transcripts use exons |
| Dp71 | | | | | 63-79 with a novel 80- to 100-nt exon |
| isoform | | | | | containing an ATG start site for a new coding |
| | | | | | sequence of 17 nt. The short coding sequence is |
| | | | | | in-frame with the consecutive dystrophin |
| | | | | | sequence from exon 63. Differential splicing of |
| | | | | | exons 71 and 78 produces at least four Dp71 |
| | | | | | isoforms. Of these, this transcript (Dp71) |
| | | | | | includes both exons 71 and 78. |
| Dystrophin | NM_004016.2 | 22 | NP_004007.1 | 23 | Transcript Variant: Dp71 transcripts use exons |
| Dp71b | | | | | 63-79 with a novel 80- to 100-nt exon |
| isoform | | | | | containing an ATG start site for a new coding |
| | | | | | sequence of 17 nt. The short coding sequence is |
| | | | | | in-frame with the consecutive dystrophin |
| | | | | | sequence from exon 63. Differential splicing of |
| | | | | | exons 71 and 78 produces at least four Dp71 |
| | | | | | isoforms. Of these, this transcript (Dp71b) |
| | | | | | lacks exon 78 and encodes a protein with a |
| | | | | | different C-terminus than Dp71 and Dp71a |
| | | | | | isoforms. |
| Dystrophin | NM_004017.2 | 24 | NP_004008.1 | 25 | Transcript Variant: Dp71 transcripts use exons |
| Dp71a | | | | | 63-79 with a novel 80- to 100-nt exon |
| isoform | | | | | containing an ATG start site for a new coding |
| | | | | | sequence of 17 nt. The short coding sequence is |
| | | | | | in-frame with the consecutive dystrophin |
| | | | | | sequence from exon 63. Differential splicing of |
| | | | | | exons 71 and 78 produces at least four Dp71 |
| | | | | | isoforms. Of these, this transcript (Dp71a) |
| | | | | | lacks exon 71. |
| Dystrophin | NM_004018.2 | 26 | NP_004009.1 | 27 | Transcript Variant: Dp71 transcripts use exons |
| Dp71ab | | | | | 63-79 with a novel 80- to 100-nt exon |
| isoform | | | | | containing an ATG start site for a new coding |
| | | | | | sequence of 17 nt. The short coding sequence is |
| | | | | | in-frame with the consecutive dystrophin |
| | | | | | sequence from exon 63. Differential splicing of |
| | | | | | exons 71 and 78 produces at least four Dp71 |
| | | | | | isoforms. Of these, this transcript (Dp71ab) |
| | | | | | lacks both exons 71 and 78 and encodes a |
| | | | | | protein with a C-terminus like isoform Dp71b. |
| Dystrophin | NM_004019.2 | 28 | NP_004010.1 | 29 | Transcript Variant: transcript Dp40 uses exons |
| Dp40 | | | | | 63-70. The 5′ UTR and encoded first 7 aa are |
| isoform | | | | | identical to that in transcript Dp71, but the |
| | | | | | stop codon lies at the splice junction of the |
| | | | | | exon/intron 70. The 3′ UTR includes nt from |
| | | | | | intron 70 which includes an alternative |
| | | | | | polyadenylation site. The Dp40 isoform lacks |
| | | | | | the normal C-terminal end of full-length |
| | | | | | dystrophin (aa 3409-3685). |
| Dystrophin | NM_004020.3 | 30 | NP_004011.2 | 31 | Transcript Variant: Dp140 transcripts use exons |
| Dp140c | | | | | 45-79, starting at a promoter/exon 1 located in |
| isoform | | | | | intron 44. Dp140 transcripts have a long (1 kb) |
| | | | | | 5′ UTR since translation is initiated in exon |
| | | | | | 51 (corresponding to aa 2461 of dystrophin). In |
| | | | | | addition to the alternative promoter and exon |
| | | | | | 1, differential splicing of exons 71-74 and 78 |
| | | | | | produces at least five Dp140 isoforms. Of |
| | | | | | these, this transcript (Dp140c) lacks exons |
| | | | | | 71-74. |
| Dystrophin | NM_004021.2 | 32 | NP_004012.1 | 33 | Transcript Variant: Dp140 transcripts use exons |
| Dp140b | | | | | 45-79, starting at a promoter/exon 1 located in |
| isoform | | | | | intron 44. Dp140 transcripts have a long (1 kb) |
| | | | | | 5′ UTR since translation is initiated in exon |
| | | | | | 51 (corresponding to aa 2461 of dystrophin). In |
| | | | | | addition to the alternative promoter and exon |
| | | | | | 1, differential splicing of exons 71-74 and 78 |
| | | | | | produces at least five Dp140 isoforms. Of |
| | | | | | these, this transcript (Dp140b) lacks exon 78 |
| | | | | | and encodes a protein with a unique C-terminus. |
| Dystrophin | NM_004022.2 | 34 | NP_004013.1 | 35 | Transcript Variant: Dp140 transcripts use exons |
| Dp140ab | | | | | 45-79, starting at a promoter/exon 1 located in |
| isoform | | | | | intron 44. Dp140 transcripts have a long (1 kb) |
| | | | | | 5′ UTR since translation is initiated in exon |
| | | | | | 51 (corresponding to aa 2461 of dystrophin). In |
| | | | | | addition to the alternative promoter and exon |
| | | | | | 1, differential splicing of exons 71-74 and 78 |
| | | | | | produces at least five Dp140 isoforms. Of |
| | | | | | these, this transcript (Dp140ab) lacks exons 71 |
| | | | | | and 78 and encodes a protein with a unique |
| | | | | | C-terminus. |
| Dystrophin | NM_004023.2 | 36 | NP_004014.1 | 37 | Transcript Variant: Dp140 transcripts use exons |
| Dp140bc | | | | | 45-79, starting at a promoter/exon 1 located in |
| isoform | | | | | intron 44. Dp140 transcripts have a long (1 kb) |
| | | | | | 5′ UTR since translation is initiated in exon |
| | | | | | 51 (corresponding to aa 2461 of dystrophin). In |
| | | | | | addition to the alternative promoter and exon |
| | | | | | 1, differential splicing of exons 71-74 and 78 |
| | | | | | produces at least five Dp140 isoforms. Of |
| | | | | | these, this transcript (Dp140bc) lacks exons |
| | | | | | 71-74 and 78 and encodes a protein with a |
| | | | | | unique C-terminus. |
| Dystrophin | XM_006724469.3 | 38 | XP_006724532.1 | 39 | |
| isoform X2 | | | | | |
| Dystrophin | XM_011545467.1 | 40 | XP_011543769.1 | 41 | |
| isoform X5 | | | | | |
| Dystrophin | XM_006724473.2 | 42 | XP_006724536.1 | 43 | |
| isoform X6 | | | | | |
| Dystrophin | XM_006724475.2 | 44 | XP_006724538.1 | 45 | |
| isoform X8 | | | | | |
| Dystrophin | XM_017029328.1 | 46 | XP_016884817.1 | 47 | |
| isoform X4 | | | | | |
| Dystrophin | XM_006724468.2 | 48 | XP_006724531.1 | 49 | |
| isoform X1 | | | | | |
| Dystrophin | XM_017029331.1 | 50 | XP_016884820.1 | 51 | |
| isoform | | | | | |
| X13 | | | | | |
| Dystrophin | XM_006724470.3 | 52 | XP_006724533.1 | 53 | |
| isoform X3 | | | | | |
| Dystrophin | XM_006724474.3 | 54 | XP_006724537.1 | 55 | |
| isoform X7 | | | | | |
| Dystrophin | XM_011545468.2 | 56 | XP_011543770.1 | 57 | |
| isoform X9 | | | | | |
| Dystrophin | XM_017029330.1 | 58 | XP_016884819.1 | 59 | |
| isoform | | | | | |
| X11 | | | | | |
| Dystrophin | XM_017029329.1 | 865 | XP_016884818.1 | 866 | |
| isoform | | | | | |
| X10 | | | | | |
| Dystrophin | XM_011545469.1 | 867 | XP_011543771.1 | 868 | |
| isoform | | | | | |
| X12 | | | | | |

[0038] In embodiments, the guide RNA targets a mutant DMD exon. In some embodiments, the mutant exon is exon 23 or 51. In some embodiments, the guide RNA targets at least one of exons 1, 23, 41, 44, 46, 47, 48, 49, 50, 51, 52, 53, 54, or 55 of the dystrophin gene. In embodiments, the guide RNA targets at least one of introns 44, 45, 50, 51, 52, 53, 54, or 55 of the dystrophin gene. In preferred embodiments, the guide RNAs are designed to induce skipping of exon 51 or exon 23. In embodiments, the gRNA is targeted to a splice acceptor site of exon 51 or exon 23.

[0039] Suitable gRNAs and genomic target sequences for use in various compositions and methods disclosed herein are provided as SEQ ID NOs: 60-705, 712-862, and 947-2377.

[0040] In some embodiments, the gRNA or gRNA target site has a sequence of any one of the gRNAs or gRNA target sites shown in Tables 5-19.

[0041] In some embodiments, gRNAs of the disclosure comprise a sequence that is complementary to a target sequence within a coding sequence or a non-coding sequence corresponding to the DMD gene, and, therefore, hybridize to the target sequence. In some embodiments, gRNAs for Cpf1 comprise a single crRNA containing a direct repeat scaffold sequence followed by 24 nucleotides of guide sequence. In some embodiments, a “guide” sequence of the crRNA comprises a sequence of the gRNA that is complementary to a target sequence. In some embodiments, crRNA of the disclosure comprises a sequence of the gRNA that is not complementary to a target sequence. “Scaffold” sequences of the disclosure link the gRNA to the Cpf1 polypeptide. “Scaffold” sequences of the disclosure are not equivalent to a tracrRNA sequence of a gRNA-Cas9 construct.

[0042] In some embodiments, a nucleic acid may comprise one or more sequences encoding a gRNA. In some embodiments, a nucleic acid may comprise 1, 2, 3, 4, 5, 6, 7, 8, 9, 10, 11, 12, 13, 14, 15, 16, 17, 18, 19, or 20 sequences encoding a gRNA. In some embodiments, all of the sequences encode the same gRNA. In some embodiments, all of the sequences encode different gRNAs. In some embodiments, at least 2 of the sequences encode the same gRNA, for example at least 3, 4, 5, 6, 7, 8, 9, 10, 11, 12, 13, 14, 15, 16, 17, 18, 19, or 20 of the sequences encode the same gRNA.

### Nucleases

[0043] Cas Nucleases.

[0044] CRISPR-associated (cas) genes are often associated with CRISPR repeat-spacer arrays. As of 2013, more than forty different Cas protein families had been described. Of these protein families, Cas1 appears to be ubiquitous among different CRISPR/Cas systems. Particular combinations of cas genes and repeat structures have been used to define 8 CRISPR subtypes (Ecoli, Ypest, Nmeni, Dvulg, Tneap, Hmari, Apern, and Mtube), some of which are associated with an additional gene module encoding repeat-associated mysterious proteins (RAMPs). More than one CRISPR subtype may occur in a single genome. The sporadic distribution of the CRISPR/Cas subtypes suggests that the system is subject to horizontal gene transfer during microbial evolution.

[0045] Exogenous DNA is apparently processed by proteins encoded by Cas genes into small elements (˜30 base pairs in length), which are then somehow inserted into the CRISPR locus near the leader sequence. RNAs from the CRISPR loci are constitutively expressed and are processed by Cas proteins to small RNAs composed of individual, exogenously-derived sequence elements with a flanking repeat sequence. The RNAs guide other Cas proteins to silence exogenous genetic elements at the RNA or DNA level. Evidence suggests functional diversity among CRISPR subtypes. The Cse (Cas subtype E coli) proteins (called CasA-E in E. coli) form a functional complex, Cascade, that processes CRISPR RNA transcripts into spacer-repeat units that Cascade retains. In other prokaryotes, Cas6 processes the CRISPR transcripts. Interestingly, CRISPR-based phage inactivation in E. coli requires Cascade and Cas3, but not Cas1 and Cas2. The Cmr (Cas RAMP module) proteins found in Pyrococcus furiosus and other prokaryotes form a functional complex with small CRISPR RNAs that recognizes and cleaves complementary target RNAs. RNA-guided CRISPR enzymes are classified as type V restriction enzymes.

[0046] Cas9 is a nuclease, an enzyme specialized for cutting DNA, with two active cutting sites, one for each strand of the double helix. One or both sites may be deactivated while preserving Cas9's ability to locate its target DNA. Jinek et al. (2012) combined tracrRNA and spacer RNA into a “single-guide RNA” molecule that, mixed with Cas9, can find and cut the correct DNA targets and such synthetic guide RNAs are used for gene editing.

[0047] Cas9 proteins are highly enriched in pathogenic and commensal bacteria. CRISPR/Cas-mediated gene regulation may contribute to the regulation of endogenous bacterial genes, particularly during bacterial interaction with eukaryotic hosts. For example, Cas protein Cas9 of Francisella novicida uses a unique, small, CRISPR/Cas-associated RNA (scaRNA) to repress an endogenous transcript encoding a bacterial lipoprotein that is critical for F. novicida to dampen host response and promote virulence. It has been shown that coinjection of Cas9 mRNA and sgRNAs into the germline (zygotes) can be used to generate mice with mutations. Delivery of Cas9 DNA sequences also is contemplated.

[0048] The CRISPR/Cas systems are separated into three classes. Class 1 uses several Cas proteins together with the CRISPR RNAs (crRNA) to build a functional endonuclease. Class 2 CRISPR systems use a single Cas protein with a crRNA. Cpf1 has been recently identified as a Class II, Type V CRISPR/Cas system containing a 1,300 amino acid protein. See also U.S. Patent Publication 2014/0068797, which is incorporated by reference in its entirety.

[0049] In some embodiments, the compositions of the disclosure include a small version of a Cas9 from the bacterium Staphylococcus aureus (UniProt Accession No. J7RUA5). The small version of the Cas9 provides advantages over wildtype or full length Cas9. In some embodiments the Cas9 is a Streptococcus pyogenes (spCas9).

[0050] Cpf1 Nucleases.

[0051] Clustered Regularly Interspaced Short Palindromic Repeats from Prevotella and Francisella 1 or CRISPR/Cpf1 is a DNA-editing technology which shares some similarities with the CRISPR/Cas9 system. Cpf1 is an RNA-guided endonuclease of a class II CRISPR/Cas system. This acquired immune mechanism is found in Prevotella and Francisella bacteria. It prevents genetic damage from viruses. Cpf1 genes are associated with the CRISPR locus, coding for an endonuclease that use a guide RNA to find and cleave viral DNA. Cpf1 is a smaller and simpler endonuclease than Cas9, overcoming some of the CRISPR/Cas9 system limitations.

[0052] Cpf1 appears in many bacterial species. The ultimate Cpf1 endonuclease that was developed into a tool for genome editing was taken from one of the first 16 species known to harbor it.

[0053] In embodiments, the Cpf1 is a Cpf1 enzyme from Acidaminococcus (species BV3L6, UniProt Accession No. U2UMQ6; SEQ ID NO: 870), having the sequence set forth below:

| | |
|---|---|
| 1 | MTQFEGFTNL YQVSKTLRFE LIPQGKTLKH IQEQGFIEED KARNDHYKEL KPIIDRIYKT |
| 61 | YADQCLQLVQ LDWENLSAAI DSYRKEKTEE TRNALIEEQA TYRNAIHDYF IGRTDNLTDA |
| 121 | INKRHAEIYK GLFKAELFNG KVLKQLGTVT TTEHENALLR SFDKFTTYFS GFYENRKNVF |
| 181 | SAEDISTAIP HRIVQDNFPK FKENCHIFTR LITAVPSLRE HFENVKKAIG IFVSTSIEEV |
| 241 | FSFPFYNQLL TQTQIDLYNQ LLGGISREAG TEKIKGLNEV LNLAIQKNDE TAHIIASLPH |
| 301 | RFIPLFKQIL SDRNTLSFIL EEFKSDEEVI QSFCKYKTLL RNENVLETAE ALFNELNSID |
| 361 | LTHIFISHKK LETISSALCD HWDTLRNALY ERRISELTGK ITKSAKEKVQ RSLKHEDINL |
| 421 | QEIISAAGKE LSEAFKQKTS EILSHAHAAL DQPLPTTLKK QEEKEILKSQ LDSLLGLYHL |
| 481 | LDWFAVDESN EVDPEFSARL TGIKLEMEPS LSFYNKARNY ATKKPYSVEK FKLNFQMPTL |
| 541 | ASGWDVNKEK NNGAILFVKN GLYYLGIMPK QKGRYKALSF EPTEKTSEGF DKMYYDYFPD |
| 601 | AAKMIPKCST QLKAVTAHFQ THTTPILLSN NFIEPLEITK EIYDLNNPEK EPKKFQTAYA |
| 661 | KKTGDQKGYR EALCKWIDFT RDFLSKYTKT TSIDLSSLRP SSQYKDLGEY YAELNPLLYH |
| 721 | ISFQRIAEKE IMDAVETGKL YLFQIYNKDF AKGHHGKPNL HTLYWTGLFS PENLAKTSIK |
| 781 | LNGQAELFYR PKSRMKRMAH RLGEKMLNKK LKDQKTPIPD TLYQELYDYV NHRLSHDLSD |
| 841 | EARALLPNVI TKEVSHEIIK DRRFTSDKFF FHVPITLNYQ AANSPSKFNQ RVNAYLKEHP |
| 901 | ETPIIGIDRG ERNLIYITVI DSTGKILEQR SLNTIQQFDY QKKLDNREKE RVAARQAWSV |
| 961 | VGTIKDLKQG YLSQVIHEIV DLMIHYQAVV VLENLNFGFK SKRTGIAEKA VYQQFEKMLI |
| 1021 | DKLNCLVLKD YPAEKVGGVL NPYQLTDQFT SFAKMGTQSG FLFYVPAPYT SKIDPLTGFV |
| 1081 | DPFVWKTIKN HESRKHFLEG FDFLHYDVKT GDFILHFKMN RNLSFQRGLP GFMPAWDIVF |
| 1141 | EKNETQFDAK GTPFIAGKRI VPVIENHRFT GRYRDLYPAN ELIALLEEKG IVFRDGSNIL |
| 1201 | PKLLENDDSH AIDTMVALIR SVLQMRNSNA ATGEDYINSP VRDLNGVCFD SRFQNPEWPM |
| 1261 | DADANGAYHI ALKGQLLLNH LKESKDLKLQ NGISNQDWLA YIQELRN |

[0054] In some embodiments, the Cpf1 is a Cpf1 enzyme from Lachnospiraceae (species ND2006, UniProt Accession No. A0A182DWE3; SEQ ID NO: 871), having the sequence set forth below:

| | |
|---|---|
| 1 | AASKLEKFTN CYSLSKTLRF KAIPVGKTQE NIDNKRLLVE DEKRAEDYKG VKKLLDRYYL |
| 61 | SFINDVLHSI KLKNLNNYIS LFRKKTRTEK ENKELENLEI NLRKEIAKAF KGAAGYKSLF |
| 121 | KKDIIETILP EAADDKDEIA LVNSFNGFTT AFTGFFDNRE NMFSEEAKST SIAFRCINEN |
| 181 | LTRYISNMDI FEKVDAIFDK HEVQEIKEKI LNSDYDVEDF FEGEFFNFVL TQEGIDVYNA |
| 241 | IIGGFVTESG EKIKGLNEYI NLYNAKTKQA LPKFKPLYKQ VLSDRESLSF YGEGYTSDEE |
| 301 | VLEVFRNTLN KNSEIFSSIK KLEKLFKNFD EYSSAGIFVK NGPAISTISK DIFGEWNLIR |
| 361 | DKWNAEYDDI HLKKKAVVTE KYEDDRRKSF KKIGSFSLEQ LQEYADADLS VVEKLKEIII |
| 421 | QKVDEIYKVY GSSEKLFDAD FVLEKSLKKN DAVVAIMKDL LDSVKSFENY IKAFFGEGKE |
| 481 | TNRDESFYGD FVLAYDILLK VDHIYDAIRN YVTQKPYSKD KFKLYFQNPQ FMGGWDKDKE |
| 541 | TDYRATILRY GSKYYLAIMD KKYAKCLQKI DKDDVNGNYE KINYKLLPGP NKMLPKVFFS |
| 601 | KKWMAYYNPS EDIQKIYKNG TFKKGDMFNL NDCHKLIDFF KDSISRYPKW SNAYDFNFSE |
| 661 | TEKYKDIAGF YREVEEQGYK VSFESASKKE VDKLVEEGKL YMFQIYNKDF SDKSHGTPNL |
| 721 | HTMYFKLLFD ENNHGQIRLS GGAELFMRRA SLKKEELVVH PANSPIANKN PDNPKKTTTL |
| 781 | SYDVYKDKRF SEDQYELHIP IAINKCPKNI FKINTEVRVL LKHDDNPYVI GIDRGERNLL |
| 841 | YIVVVDGKGN IVEQYSLNEI INNFNGIRIK TDYHSLLDKK EKERFEARQN WTSIENIKEL |
| 901 | KAGYISQVVH KICELVEKYD AVIALEDLNS GFKNSRVKVE KQVYQKFEKM LIDKLNYMVD |
| 961 | KKSNPCATGG ALKGYQITNK FESFKSMSTQ NGFIFYIPAW LTSKIDPSTG FVNLLKTKYT |
| 1021 | SIADSKKFIS SFDRIMYVPE EDLFEFALDY KNFSRTDADY IKKWKLYSYG NRIRIFAAAK |
| 1081 | KNNVFAWEEV CLTSAYKELF NKYGINYQQG DIRALLCEQS DKAFYSSFMA LMSLMLQMRN |
| 1141 | SITGRTDVDF LISPVKNSDG IFYDSRNYEA QENAILPKNA DANGAYNIAR KVLWAIGQFK |
| 1201 | KAEDEKLDKV KIAISNKEWL EYAQTSVK |

[0055] In some embodiments, the Cpf1 is codon optimized for expression in mammalian cells. In some embodiments, the Cpf1 is codon optimized for expression in human cells or mouse cells.

[0056] The Cpf1 locus contains a mixed alpha/beta domain, a RuvC-I followed by a helical region, a RuvC-II and a zinc finger-like domain. The Cpf1 protein has a RuvC-like endonuclease domain that is similar to the RuvC domain of Cas9. Furthermore, Cpf1 does not have a HNH endonuclease domain, and the N-terminal of Cpf1 does not have the alpha-helical recognition lobe of Cas9.

[0057] Cpf1 CRISPR-Cas domain architecture shows that Cpf1 is functionally unique, being classified as Class 2, type V CRISPR system. The Cpf1 loci encode Cas1, Cas2 and Cas4 proteins more similar to types I and III than from type II systems. Database searches suggest the abundance of Cpf1-family proteins in many bacterial species.

[0058] Functional Cpf1 does not require a tracrRNA, therefore, only crRNA is required. This benefits genome editing because Cpf1 is not only smaller than Cas9, but also it has a smaller sgRNA molecule (approximately half as many nucleotides as Cas9).

[0059] The Cpf1-crRNA complex cleaves target DNA or RNA by identification of a protospacer adjacent motif 5′-YTN-3′ (where “Y” is a pyrimidine and “N” is any nucleobase) or 5′-TTN-3′, in contrast to the G-rich PAM targeted by Cas9. After identification of PAM, Cpf1 introduces a sticky-end-like DNA double-stranded break of 4 or 5 nucleotides overhang.

[0060] The CRISPR/Cpf1 system consist of a Cpf1 enzyme and a guide RNA that finds and positions the complex at the correct spot on the double helix to cleave target DNA. CRISPR/Cpf1 systems activity has three stages:
[0061] Adaptation, during which Cas1 and Cas2 proteins facilitate the adaptation of small fragments of DNA into the CRISPR array;
[0062] Formation of crRNAs: processing of pre-cr-RNAs producing of mature crRNAs to guide the Cas protein; and
[0063] Interference, in which the Cpf1 is bound to a crRNA to form a binary complex to identify and cleave a target DNA sequence.

[0064] Cas9 Versus Cpf1.

[0065] Cas9 requires two RNA molecules to cut DNA while Cpf1 needs one. The proteins also cut DNA at different places, offering researchers more options when selecting an editing site. Cas9 cuts both strands in a DNA molecule at the same position, leaving behind ‘blunt’ ends. Cpf1 leaves one strand longer than the other, creating ‘sticky’ ends that are easier to work with. Cpf1 appears to be more able to insert new sequences at the cut site, compared to Cas9. Although the CRISPR/Cas9 system can efficiently disable genes, it is challenging to insert genes or generate a knock-in. Cpf1 lacks tracrRNA, utilizes a T-rich PAM and cleaves DNA via a staggered DNA DSB.

[0066] In summary, important differences between Cpf1 and Cas9 systems are that Cpf1 recognizes different PAMs, enabling new targeting possibilities, creates 4-5 nt long sticky ends, instead of blunt ends produced by Cas9, enhancing the efficiency of genetic insertions and specificity during NHEJ or HDR, and cuts target DNA further away from PAM, further away from the Cas9 cutting site, enabling new possibilities for cleaving the DNA.

TABLE 2
Differences between Cas9 and Cpf1

| Feature | Cas9 | Cpf1 |
|---|---|---|
| Structure | Two RNA required | One RNA required |
| | (Or 1 fusion transcript | |
| | (crRNA + tracrRNA = gRNA)) | |
| Cutting | Blunt end cuts | Staggered end cuts |
| mechanism | | |
| Cutting site | Proximal to recognition site | Distal from |
| | | recognition site |
| Target sites | G-rich PAM | T-rich PAM |

[0067] Other Nucleases.

[0068] In some embodiments, the nuclease is a Cas9 or a Cpf1 nuclease. In addition to Cas9 nucleases and Cpf1 nucleases, other nucleases may be used in the compositions and methods of the disclosure. For example, in some embodiments, the nuclease is a Type II, Type V-A, Type V-B, Type V-C, Type V-U, Type VI-B nuclease. In some embodiments, the nuclease is a Cas9, Cas12a, Cas12b, Cas12c, Tnp-B like, Cas13a (C2c2), or Cas13b nuclease. In some embodiments, the nuclease is a TAL nuclease, a meganuclease, or a zinc-finger nuclease.

[0069] CRISPR-Mediated Gene Editing.

[0070] The first step in editing the DMD gene using CRISPR/Cpf1 or CRISPR/Cas9 (or another nuclease) is to identify the genomic target sequence. The genomic target for the gRNAs of the disclosure can be any approximately 24 nucleotide DNA sequence, provided that the sequence is unique compared to the rest of the genome. In some embodiments, the genomic target sequence corresponds to a sequence within exon 51, exon 45, exon 44, exon 53, exon 46, exon 52, exon 50, exon 43, exon 6, exon 7, exon 8, and/or exon 55 of the human dystrophin gene. In some embodiments, the genomic target sequence is a 5′ or 3′ splice site of exon 51, exon 45, exon 44, exon 53, exon 46, exon 52, exon 50, exon 43, exon 6, exon 7, exon 8, and/or exon 55 of the human dystrophin gene. In some embodiments, the genomic target sequence corresponds to a sequence within an intron immediately upstream or downstream of exon 51, exon 45, exon 44, exon 53, exon 46, exon 52, exon 50, exon 43, exon 6, exon 7, exon 8, and/or exon 55 of the human dystrophin gene. Exemplary genomic target sequences can be found in Tables 2, 6, 8, 10, 12, 14 and 19.

[0071] The next step in editing the DMD gene is to identify all Protospacer Adjacent Motif (PAM) sequences within the genetic region to be targeted. The target sequence must be immediately upstream of a PAM. Once all possible PAM sequences and putative target sites have been identified, the next step is to choose which site is likely to result in the most efficient on-target cleavage. The gRNA targeting sequence needs to match the target sequence, and the gRNA targeting sequence must not match additional sites within the genome. In preferred embodiments, the gRNA targeting sequence has perfect homology to the target with no homology elsewhere in the genome. In some embodiments, a given gRNA targeting sequence will have additional sites throughout the genome where partial homology exists. These sites are called “off-targets” and should be considered when designing a gRNA. In general, off-target sites are not cleaved as efficiently when mismatches occur near the PAM sequence, so gRNAs with no homology or those with mismatches close to the PAM sequence will have the highest specificity. In addition to “off-target activity”, factors that maximize cleavage of the desired target sequence (“on-target activity”) must be considered. It is known to those of skill in the art that two gRNA targeting sequences, each having 100% homology to the target DNA may not result in equivalent cleavage efficiency. In fact, cleavage efficiency may increase or decrease depending upon the specific nucleotides within the selected target sequence. Close examination of predicted on-target and off-target activity of each potential gRNA targeting sequence is necessary to design the best gRNA. Several gRNA design programs have been developed that are capable of locating potential PAM and target sequences and ranking the associated gRNAs based on their predicted on-target and off-target activity (e.g. CRISPRdirect, available at www.crispr.dbcls.jp).

[0072] The next step is to synthesize and clone desired gRNAs. Targeting oligos can be synthesized, annealed, and inserted into plasmids containing the gRNA scaffold using standard restriction-ligation cloning. However, the exact cloning strategy will depend on the gRNA vector that is chosen. The gRNAs for Cpf1 are notably simpler than the gRNAs for Cas9, and only consist of a single crRNA containing direct repeat scaffold sequence followed by approximately 24 nucleotides of guide sequence.

[0073] Each gRNA should then be validated in one or more target cell lines. For example, after the Cas9 or Cpf1 and the gRNA are delivered to the cell, the genomic target region may be amplified using PCR and sequenced according to methods known to those of skill in the art.

[0074] In some embodiments, gene editing may be performed in vitro or ex vivo. In some embodiments, cells are contacted in vitro or ex vivo with a Cas9 or a Cpf1 and a gRNA that targets a dystrophin splice site. In some embodiments, the cells are contacted with one or more nucleic acids encoding the Cas9 or Cpf1 and the guide RNA. In some embodiments, the one or more nucleic acids are introduced into the cells using, for example, lipofection or electroporation. Gene editing may also be performed in zygotes. In embodiments, zygotes may be injected with one or more nucleic acids encoding Cas9 or Cpf1 and a gRNA that targets a dystrophin splice site. The zygotes may subsequently be injected into a host.

[0075] In embodiments, the Cas9 or Cpf1 is provided on a vector. In embodiments, the vector contains a Cas9 derived from S. pyogenes (SpCas9, SEQ ID NO. 872). In embodiments, the vector contains a Cas9 derived from S. aureus (SaCas9, SEQ ID NO. 873). In embodiments, the vector contains a Cpf1 sequence derived from a Lachnospiraceae bacterium. See, for example, Uniprot Accession No. A0A182DWE3; SEQ ID NO. 871. In embodiments, the vector contains a Cpf1 sequence derived from an Acidaminococcus bacterium. See, for example, Uniprot Accession No. U2UMQ6; SEQ ID NO. 870. In some embodiments, the Cas9 or Cpf1 sequence is codon optimized for expression in human cells or mouse cells. In some embodiments, the vector further contains a sequence encoding a fluorescent protein, such as GFP, which allows Cas9 or Cpf1-expressing cells to be sorted using fluorescence activated cell sorting (FACS). In some embodiments, the vector is a viral vector such as an adeno-associated viral vector.

[0076] In embodiments, the gRNA is provided on a vector. In some embodiments, the vector is a viral vector such as an adeno-associated viral vector. In embodiments, the Cas9 or Cpf1 and the guide RNA are provided on the same vector. In embodiments, the Cas9 or Cpf1 and the guide RNA are provided on different vectors.

[0077] In some embodiments, the cells are additionally contacted with a single-stranded DMD oligonucleotide to effect homology directed repair. In some embodiments, small INDELs restore the protein reading frame of dystrophin (“reframing” strategy). When the reframing strategy is used, the cells may be contacted with a single gRNA. In embodiments, a splice donor or splice acceptor site is disrupted, which results in exon skipping and restoration of the protein reading frame (“exon skipping” strategy). When the exon skipping strategy is used, the cells may be contacted with two or more gRNAs.

[0078] Efficiency of in vitro or ex vivo Cas9 or Cpf1-mediated DNA cleavage may be assessed using techniques known to those of skill in the art, such as the T7 E1 assay. Restoration of DMD expression may be confirmed using techniques known to those of skill in the art, such as RT-PCR, western blotting, and immunocytochemistry.

[0079] In some embodiments, in vitro or ex vivo gene editing is performed in a muscle or satellite cell. In some embodiments, gene editing is performed in iPSC or iCM cells. In embodiments, the iPSC cells are differentiated after gene editing. For example, the iPSC cells may be differentiated into a muscle cell or a satellite cell after editing. In embodiments, the iPSC cells are differentiated into cardiac muscle cells, skeletal muscle cells, or smooth muscle cells. In embodiments, the iPSC cells are differentiated into cardiomyocytes. iPSC cells may be induced to differentiate according to methods known to those of skill in the art.

[0080] In some embodiments, contacting the cell with the Cas9 or the Cpf1 and the gRNA restores dystrophin expression. In embodiments, cells which have been edited in vitro or ex vivo, or cells derived therefrom, show levels of dystrophin protein that is comparable to wildtype cells. In embodiments, the edited cells, or cells derived therefrom, express dystrophin at a level that is 50%, 60%, 70%, 80%, 90%, 95% or any percentage in between of wildtype dystrophin expression levels. In embodiments, the cells which have been edited in vitro or ex vivo, or cells derived therefrom, have a mitochondrial number that is comparable to that of wildtype cells. In embodiments the edited cells, or cells derived therefrom, have 50%, 60%, 70%, 80%, 90%, 95% or any percentage in between as many mitochondria as wildtype cells. In embodiments, the edited cells, or cells derived therefrom, show an increase in oxygen consumption rate (OCR) compared to non-edited cells at baseline.

[0081] Nucleic Acid Expression Vectors.

[0082] As discussed above, in certain embodiments, expression cassettes are employed to express a transcription factor product, either for subsequent purification and delivery to a cell/subject, or for use directly in a genetic-based delivery approach. Provided herein are expression vectors which contain one or more nucleic acids encoding Cas9 or Cpf1 and at least one DMD guide RNA that targets a dystrophin splice site. In some embodiments, a nucleic acid encoding Cas9 or Cpf1 and a nucleic acid encoding at least one guide RNA are provided on the same vector. In further embodiments, a nucleic acid encoding Cas9 or Cpf1 and a nucleic acid encoding least one guide RNA are provided on separate vectors.

[0083] Expression requires that appropriate signals be provided in the vectors, and include various regulatory elements such as enhancers/promoters from both viral and mammalian sources that drive expression of the genes of interest in cells. Elements designed to optimize messenger RNA stability and translatability in host cells also are defined. The conditions for the use of a number of dominant drug selection markers for establishing permanent, stable cell clones expressing the products are also provided, as is an element that links expression of the drug selection markers to expression of the polypeptide.

[0084] Throughout this application, the term “expression cassette” is meant to include any type of genetic construct containing a nucleic acid coding for a gene product in which part or all of the nucleic acid encoding sequence is capable of being transcribed and translated, i.e., is under the control of a promoter. A “promoter” refers to a DNA sequence recognized by the synthetic machinery of the cell, or introduced synthetic machinery, required to initiate the specific transcription of a gene. The phrase “under transcriptional control” means that the promoter is in the correct location and orientation in relation to the nucleic acid to control RNA polymerase initiation and expression of the gene. An “expression vector” is meant to include expression cassettes comprised in a genetic construct that is capable of replication, and thus including one or more of origins of replication, transcription termination signals, poly-A regions, selectable markers, and multipurpose cloning sites.

[0085] Regulatory Elements.

[0086] The term promoter will be used here to refer to a group of transcriptional control modules that are clustered around the initiation site for RNA polymerase II. Much of the thinking about how promoters are organized derives from analyses of several viral promoters, including those for the HSV thymidine kinase (tk) and SV40 early transcription units. These studies, augmented by more recent work, have shown that promoters are composed of discrete functional modules, each consisting of approximately 7-20 bp of DNA, and containing one or more recognition sites for transcriptional activator or repressor proteins.

[0087] At least one module in each promoter functions to position the start site for RNA synthesis. The best known example of this is the TATA box, but in some promoters lacking a TATA box, such as the promoter for the mammalian terminal deoxynucleotidyl transferase gene and the promoter for the SV40 late genes, a discrete element overlying the start site itself helps to fix the place of initiation.

[0088] RNA Polymerase and Pol III Promoters.

[0089] In eukaryotes, RNA polymerase III (also called Pol III) transcribes DNA to synthesize ribosomal 5S rRNA, tRNA and other small

[0090] RNAs. The genes transcribed by RNA Pol III fall in the category of “housekeeping” genes whose expression is required in all cell types and most environmental conditions. Therefore, the regulation of Pol III transcription is primarily tied to the regulation of cell growth and the cell cycle, thus requiring fewer regulatory proteins than RNA polymerase II. Under stress conditions however, the protein Maf1 represses Pol III activity.

[0091] In the process of transcription (by any polymerase) there are three main stages: (i) initiation, requiring construction of the RNA polymerase complex on the gene's promoter; (ii) elongation, the synthesis of the RNA transcript; and (iii) termination, the finishing of RNA transcription and disassembly of the RNA polymerase complex.

[0092] Promoters under the control of RNA Pol III include those for ribosomal 5S rRNA, tRNA and few other small RNAs such as U6 spliceosomal RNA, RNase P and RNase MRP RNA, 7SL RNA (the RNA component of the signal recognition particles), Vault RNAs, Y RNA, SINEs (short interspersed repetitive elements), 7SK RNA, two microRNAs, several small nucleolar RNAs and several few regulatory antisense RNAs.

### Additional Promoters and Elements

[0093] In some embodiments, the Cas9 or Cpf1 constructs of the disclosure are expressed by a muscle-cell specific promoter. This muscle-cell specific promoter may be constitutively active or may be an inducible promoter.

[0094] Additional promoter elements regulate the frequency of transcriptional initiation. Typically, these are located in the region 30-110 bp upstream of the start site, although a number of promoters have recently been shown to contain functional elements downstream of the start site as well. The spacing between promoter elements frequently is flexible, so that promoter function is preserved when elements are inverted or moved relative to one another. In the tk promoter, the spacing between promoter elements can be increased to 50 bp apart before activity begins to decline. Depending on the promoter, it appears that individual elements can function either co-operatively or independently to activate transcription.

[0095] In certain embodiments, viral promoters such as the human cytomegalovirus (CMV) immediate early gene promoter, the SV40 early promoter, the Rous sarcoma virus long terminal repeat, rat insulin promoter and glyceraldehyde-3-phosphate dehydrogenase can be used to obtain high-level expression of the coding sequence of interest. The use of other viral or mammalian cellular or bacterial phage promoters which are well-known in the art to achieve expression of a coding sequence of interest is contemplated as well, provided that the levels of expression are sufficient for a given purpose. By employing a promoter with well-known properties, the level and pattern of expression of the protein of interest following transfection or transformation can be optimized. Further, selection of a promoter that is regulated in response to specific physiologic signals can permit inducible expression of the gene product.

[0096] Enhancers are genetic elements that increase transcription from a promoter located at a distant position on the same molecule of DNA. Enhancers are organized much like promoters. That is, they are composed of many individual elements, each of which binds to one or more transcriptional proteins. The basic distinction between enhancers and promoters is operational. An enhancer region as a whole must be able to stimulate transcription at a distance; this need not be true of a promoter region or its component elements. On the other hand, a promoter must have one or more elements that direct initiation of RNA synthesis at a particular site and in a particular orientation, whereas enhancers lack these specificities. Promoters and enhancers are often overlapping and contiguous, often seeming to have a very similar modular organization.

[0097] Below is a list of promoters/enhancers and inducible promoters/enhancers that could be used in combination with the nucleic acid encoding a gene of interest in an expression construct. Additionally, any promoter/enhancer combination (as per the Eukaryotic Promoter Data Base EPDB) could also be used to drive expression of the gene. Eukaryotic cells can support cytoplasmic transcription from certain bacterial promoters if the appropriate bacterial polymerase is provided, either as part of the delivery complex or as an additional genetic expression construct.

[0098] The promoter and/or enhancer may be, for example, immunoglobulin light chain, immunoglobulin heavy chain, T-cell receptor, HLA DQ a and/or DQ β, β-interferon, interleukin-2, interleukin-2 receptor, MHC class II 5, MHC class II HLA-Dra, β-Actin, muscle creatine kinase (MCK), prealbumin (transthyretin), elastase I, metallothionein (MTII), collagenase, albumin, α-fetoprotein, t-globin, β-globin, c-fos, c-HA-ras, insulin, neural cell adhesion molecule (NCAM), α₁-antitrypain, H2B (TH2B) histone, mouse and/or type I collagen, glucose-regulated proteins (GRP94 and GRP78), rat growth hormone, human serum amyloid A (SAA), troponin I (TN I), platelet-derived growth factor (PDGF), Duchenne muscular dystrophy, SV40, polyoma, retroviruses, papilloma virus, hepatitis B virus, human immunodeficiency virus, cytomegalovirus (CMV), and gibbon ape leukemia virus.

[0099] In some embodiments, inducible elements may be used. In some embodiments, the inducible element is, for example, MTII, MMTV (mouse mammary tumor virus), β-interferon, adenovirus 5 E2, collagenase, stromelysin, SV40, murine MX gene, GRP78 gene, α-2-macroglobulin, vimentin, MHC class I gene H-2κb, HSP70, proliferin, tumor necrosis factor, and/or thyroid stimulating hormone a gene. In some embodiments, the inducer is phorbol ester (TFA), heavy metals, glucocorticoids, poly(rI)x, poly(rc), E1A, phorbol ester (TPA), interferon, Newcastle Disease Virus, A23187, IL-6, serum, interferon, SV40 large T antigen, PMA, and/or thyroid hormone. Any of the inducible elements described herein may be used with any of the inducers described herein.

[0100] Of particular interest are muscle specific promoters. These include the myosin light chain-2 promoter, the α-actin promoter, the troponin 1 promoter; the Na⁺/Ca²⁺ exchanger promoter, the dystrophin promoter, the α7 integrin promoter, the brain natriuretic peptide promoter and the αB-crystallin/small heat shock protein promoter, α-myosin heavy chain promoter and the ANF promoter. In some embodiments, the muscle specific promoter is the CK8 promoter. The CK8 promoter has the following sequence (SEQ ID NO. 874):

| | |
|---|---|
| 1 | CTAGACTAGC ATGCTGCCCA TGTAAGGAGG CAAGGCCTGG GGACACCCGA GATGCCTGGT |
| 61 | TATAATTAAC CCAGACATGT GGCTGCCCCC CCCCCCCCAA CACCTGCTGC CTCTAAAAAT |
| 121 | AACCCTGCAT GCCATGTTCC CGGCGAAGGG CCAGCTGTCC CCCGCCAGCT AGACTCAGCA |
| 181 | CTTAGTTTAG GAACCAGTGA GCAAGTCAGC CCTTGGGGCA GCCCATACAA GGCCATGGGG |
| 241 | CTGGGCAAGC TGCACGCCTG GGTCCGGGGT GGGCACGGTG CCCGGGCAAC GAGCTGAAAG |
| 301 | CTCATCTGCT CTCAGGGGCC CCTCCCTGGG GACAGCCCCT CCTGGCTAGT CACACCCTGT |
| 361 | AGGCTCCTCT ATATAACCCA GGGGCACAGG GGCTGCCCTC ATTCTACCAC CACCTCCACA |
| 421 | GCACAGACAG ACACTCAGGA GCCAGCCAGC |

[0101] In some embodiments, the muscle-cell cell specific promoter is a variant of the CK8 promoter, called CK8e. The CK8e promoter has the following sequence (SEQ ID NO. 875):

| | |
|---|---|
| 1 | TGCCCATGTA AGGAGGCAAG GCCTGGGGAC ACCCGAGATG CCTGGTTATA ATTAACCCAG |
| 61 | ACATGTGGCT GCCCCCCCCC CCCCAACACC TGCTGCCTCT AAAAATAACC CTGCATGCCA |
| 121 | TGTTCCCGGC GAAGGGCCAG CTGTCCCCCG CCAGCTAGAC TCAGCACTTA GTTTAGGAAC |
| 181 | CAGTGAGCAA GTCAGCCCTT GGGGCAGCCC ATACAAGGCC ATGGGGCTGG GCAAGCTGCA |
| 241 | CGCCTGGGTC CGGGGTGGGC ACGGTGCCCG GGCAACGAGC TGAAAGCTCA TCTGCTCTCA |
| 301 | GGGGCCCCTC CCTGGGGACA GCCCCTCCTG GCTAGTCACA CCCTGTAGGC TCCTCTATAT |
| 361 | AACCCAGGGG CACAGGGGCT GCCCTCATTC TACCACCACC TCCACAGCAC AGACAGACAC |
| 421 | TCAGGAGCCA GCCAGC |

[0102] Where a cDNA insert is employed, one will typically desire to include a polyadenylation signal to effect proper polyadenylation of the gene transcript. Any polyadenylation sequence may be employed such as human growth hormone and SV40 polyadenylation signals. Also contemplated as an element of the expression cassette is a terminator. These elements can serve to enhance message levels and to minimize read through from the cassette into other sequences.

### Therapeutic Compositions

### AAV-Cas9 Vectors

[0103] In some embodiments, a Cas9 may be packaged into an AAV vector. In some embodiments, the AAV vector is a wildtype AAV vector. In some embodiments, the AAV vector contains one or more mutations. In some embodiments, the AAV vector is isolated or derived from an AAV vector of serotype AAV1, AAV2, AAV3, AAV4, AAV5, AAV6, AAV7, AAV8, AAV9, AAV10, AAV11, AAV12, AAVRh74, AAV2i8, AAVRh10, AAV39, AAV43, AAVRh8, avian AAV, bovine AAV, canine AAV, equine AAV, and ovine AAV or any combination thereof.

[0104] Exemplary AAV-Cas9 vectors contain two ITR (inverted terminal repeat) sequences which flank a central sequence region comprising the Cas9 sequence. In some embodiments, the ITRs are isolated or derived from an AAV vector of serotype AAV1, AAV2, AAV3, AAV4, AAV5, AAV6, AAV7, AAV8, AAV9, AAV10, AAV11, AAV12, AAVRh74, AAV2i8, AAVRh10, AAV39, AAV43, AAVRh8, avian AAV, bovine AAV, canine AAV, equine AAV, and ovine AAV or any combination thereof. In some embodiments, the ITRs comprise or consist of full-length and/or wildtype sequences for an AAV serotype. In some embodiments, the ITRs comprise or consist of truncated sequences for an AAV serotype. In some embodiments, the ITRs comprise or consist of elongated sequences for an AAV serotype.

[0105] In some embodiments, the ITRs comprise or consist of sequences comprising a sequence variation compared to a wildtype sequence for the same AAV serotype. In some embodiments, the sequence variation comprises one or more of a substitution, deletion, insertion, inversion, or transposition. In some embodiments, the ITRs comprise or consist of at least 100, 101, 102, 103, 104, 105, 106, 107, 108, 109, 110, 111, 112, 113, 114, 115, 116, 117, 118, 119, 120, 121, 122, 123, 124, 125, 126, 127, 128, 129, 130, 131, 132, 133, 134, 135, 136, 137, 138, 139, 140, 141, 142, 143, 144, 145, 146, 147, 148, 149 or 150 base pairs. In some embodiments, the ITRs comprise or consist of 100, 101, 102, 103, 104, 105, 106, 107, 108, 109, 110, 111, 112, 113, 114, 115, 116, 117, 118, 119, 120, 121, 122, 123, 124, 125, 126, 127, 128, 129, 130, 131, 132, 133, 134, 135, 136, 137, 138, 139, 140, 141, 142, 143, 144, 145, 146, 147, 148, 149 or 150 base pairs. In some embodiments, the ITRs have a length of 110±10 base pairs. In some embodiments, the ITRs have a length of 120±10 base pairs. In some embodiments, the ITRs have a length of 130±10 base pairs. In some embodiments, the ITRs have a length of 140±10 base pairs. In some embodiments, the ITRs have a length of 150±10 base pairs. In some embodiments, the ITRs have a length of 115, 145, or 141 base pairs.

[0106] In some embodiments, the AAV-Cas9 vector may contain one or more nuclear localization signals (NLS). In some embodiments, the AAV-Cas9 vector contains 1, 2, 3, 4, or 5 nuclear localization signals. Exemplary NLS include the c-myc NLS (SEQ ID NO: 884), the SV40 NLS (SEQ ID NO: 885), the hnRNPAI M9 NLS (SEQ ID NO: 886), the nucleoplasmin NLS (SEQ ID NO: 887), the sequence RMRKFKNKGKDTAELRRRRVEVSVELRKAKKDEQILKRRNV (SEQ ID NO: 888) of the IBB domain from importin-alpha, the sequences VSRKRPRP (SEQ ID NO: 889) and PPKKARED (SEQ ID NO: 890) of the myoma T protein, the sequence PQPKKKPL (SEQ ID NO: 891) of human p53, the sequence SALIKKKKMAP (SEQ ID NO: 892) of mouse c-abl IV, the sequences DRLRR (SEQ ID NO: 893) and KQKKRK (SEQ ID NO: 894) of the influenza virus NS1, the sequence RKLKKKIKKL (SEQ ID NO: 895) of the Hepatitis virus delta antigen and the sequence REKKKFLKRR (SEQ ID NO: 896) of the mouse Mx1 protein. Further acceptable nuclear localization signals include bipartite nuclear localization sequences such as the sequence KRKGDEVDGVDEVAKKKSKK (SEQ ID NO: 897) of the human poly(ADP-ribose) polymerase or the sequence RKCLQAGMNLEARKTKK (SEQ ID NO: 898) of the steroid hormone receptors (human) glucocorticoid.

[0107] In some embodiments, the AAV-Cas9 vector may comprise additional elements to facilitate packaging of the vector and expression of the Cas9. In some embodiments, the AAV-Cas9 vector may comprise a polyA sequence. In some embodiments, the polyA sequence may be a mini-polyA sequence. In some embodiments, the AAV-CAs9 vector may comprise a transposable element. In some embodiments, the AAV-Cas9 vector may comprise a regulator element. In some embodiments, the regulator element is an activator or a repressor.

[0108] In some embodiments, the AAV-Cas9 may contain one or more promoters. In some embodiments, the one or more promoters drive expression of the Cas9. In some embodiments, the one or more promoters are muscle-specific promoters. Exemplary muscle-specific promoters include myosin light chain-2 promoter, the a-actin promoter, the troponin 1 promoter, the Na+/Ca2+ exchanger promoter, the dystrophin promoter, the α7 integrin promoter, the brain natriuretic peptide promoter, the αB-crystallin/small heat shock protein promoter, α-myosin heavy chain promoter, the ANF promoter, the CK8 promoter and the CK8e promoter.

[0109] In some embodiments, the AAV-Cas9 vector may be optimized for production in yeast, bacteria, insect cells, or mammalian cells. In some embodiments, the AAV-Cas9 vector may be optimized for expression in human cells. In some embodiments, the AAV-Cas9 vector may be optimized for expression in a baculovirus expression system.

### AAV-sgRNA Vectors

[0110] In some embodiments, at least a first sequence encoding a gRNA and a second sequence encoding a gRNA may be packaged into an AAV vector. In some embodiments, at least a first sequence encoding a gRNA, a second sequence encoding a gRNA, and a third sequence encoding a gRNA may be packaged into an AAV vector. In some embodiments, at least a first sequence encoding a gRNA, a second sequence encoding a gRNA, a third sequence encoding a gRNA, and a fourth sequence encoding a gRNA may be packaged into an AAV vector. In some embodiments, at least a first sequence encoding a gRNA, a second sequence encoding a gRNA, a third sequence encoding a gRNA, a fourth sequence encoding a gRNA, and a fifth sequence encoding a gRNA may be packaged into an AAV vector. In some embodiments, a plurality of sequences encoding a gRNA are packaged into an AAV vector. For example, 1, 2, 3, 4, 5, 6, 7, 8, 9, 10, 11, 12, 13, 14, 15, 16, 17, 18, 19, or 20 sequences encoding a gRNA may be packaged into an AAV vector. In some embodiments, each sequence encoding a gRNA is different. In some embodiments, at least 1, 2, 3, 4, 5, 6, 7, 8, 9, 10, 11, 12, 13, 14, 15, 16, 17, 18, 19, or 20 of the sequences encoding a gRNA are the same. In some embodiments, all of the sequence encoding a gRNA are the same.

[0111] In some embodiments, the AAV vector is a wildtype AAV vector. In some embodiments, the AAV vector contains one or more mutations. In some embodiments, the AAV vector is isolated or derived from an AAV vector of serotype AAV1, AAV2, AAV3, AAV4, AAV5, AAV6, AAV7, AAV8, AAV9, AAV10, AAV11, AAV12, AAVRh74, AAV2i8, AAVRh10, AAV39, AAV43, AAVRh8, avian AAV, bovine AAV, canine AAV, equine AAV, and ovine AAV or any combination thereof.

[0112] Exemplary AAV-sgRNA vectors contain two ITR (inverted terminal repeat) sequences which flank a central sequence region comprising the sgRNA sequences. In some embodiments, the ITRs are isolated or derived from an AAV vector of serotype AAV1, AAV2, AAV3, AAV4, AAV5, AAV6, AAV7, AAV8, AAV9, AAV10, AAV11, AAV12, AAVRh74, AAV2i8, AAVRh10, AAV39, AAV43, AAVRh8, avian AAV, bovine AAV, canine AAV, equine AAV, and ovine AAV or any combination thereof. In some embodiments, the ITRs are isolated or derived from an AAV vector of a first serotype and a sequence encoding a capsid protein of the AAV-sgRNA vector is isolated or derived from an AAV vector of a second serotype. In some embodiments, the first serotype and the second serotype are the same. In some embodiments, the first serotype and the second serotype are not the same. In some embodiments, the first serotype is AAV1, AAV2, AAV3, AAV4, AAV5, AAV6, AAV7, AAV8, AAV9, AAV10, AAV11, AAV12, AAVRh74, AAV2i8, AAVRh10, AAV39, AAV43, AAVRh8, avian AAV, bovine AAV, canine AAV, equine AAV, and ovine AAV. In some embodiments, the second serotype is AAV1, AAV2, AAV3, AAV4, AAV5, AAV6, AAV7, AAV8, AAV9, AAV10, AAV11, AAV12, AAVRh74, AAV2i8, AAVRh10, AAV39, AAV43, AAVRh8, avian AAV, bovine AAV, canine AAV, equine AAV, and ovine AAV. In some embodiments, the first serotype is AAV2 and the second serotype is AAV1, AAV2, AAV3, AAV4, AAV5, AAV6, AAV7, AAV8, AAV9, AAV10, AAV11, AAV12, AAVRh74, AAV2i8, AAVRh10, AAV39, AAV43, AAVRh8, avian AAV, bovine AAV, canine AAV, equine AAV, and ovine AAV. In some embodiments, the first serotype is AAV2 and the second serotype is AAV9.

[0113] In some embodiments, a first ITR is isolated or derived from an AAV vector of a first serotype, a second ITR is isolated or derived from an AAV vector of a second serotype and a sequence encoding a capsid protein of the AAV-sgRNA vector is isolated or derived from an AAV vector of a third serotype. In some embodiments, the first serotype and the second serotype are the same. In some embodiments, the first serotype and the second serotype are not the same. In some embodiments, the first serotype, the second serotype, and the third serotype are the same. In some embodiments, the first serotype, the second serotype, and the third serotype are not the same. In some embodiments, the first serotype is AAV1, AAV2, AAV3, AAV4, AAV5, AAV6, AAV7, AAV8, AAV9, AAV10, AAV11, AAV12, AAVRh74, AAV2i8, AAVRh10, AAV39, AAV43, AAVRh8, avian AAV, bovine AAV, canine AAV, equine AAV, or ovine AAV. In some embodiments, the second serotype is AAV1, AAV2, AAV3, AAV4, AAV5, AAV6, AAV7, AAV8, AAV9, AAV10, AAV11, AAV12, AAVRh74, AAV2i8, AAVRh10, AAV39, AAV43, AAVRh8, avian AAV, bovine AAV, canine AAV, equine AAV, or ovine AAV. In some embodiments, the third serotype is AAV1, AAV2, AAV3, AAV4, AAV5, AAV6, AAV7, AAV8, AAV9, AAV10, AAV11, AAV12, AAVRh74, AAV2i8, AAVRh10, AAV39, AAV43, AAVRh8, avian AAV, bovine AAV, canine AAV, equine AAV, or ovine AAV. In some embodiments, the first serotype is AAV2, the second serotype is AAV4 and the third serotype is AAV1, AAV2, AAV3, AAV4, AAV5, AAV6, AAV7, AAV8, AAV9, AAV10, or AAV11. In some embodiments, the first serotype is AAV2, the second serotype is AAV4 and the third serotype is AAV9. Exemplary AAV-sgRNA vectors contain two ITR (inverted terminal repeat) sequences which flank a central sequence region comprising the sgRNA sequences. In some embodiments, the ITRs are isolated or derived from an AAV vector of serotype AAV1, AAV2, AAV3, AAV4, AAV5, AAV6, AAV7, AAV8, AAV9, AAV10, AAV11, AAV12, AAVRh74, AAV2i8, AAVRh10, AAV39, AAV43, AAVRh8, avian AAV, bovine AAV, canine AAV, equine AAV, ovine AAV or any combination thereof. In some embodiments, the ITRs comprise or consist of full-length and/or wildtype sequences for an AAV serotype. In some embodiments, the ITRs comprise or consist of truncated sequences for an AAV serotype. In some embodiments, the ITRs comprise or consist of elongated sequences for an AAV serotype. In some embodiments, the ITRs comprise or consist of sequences comprising a sequence variation compared to a wildtype sequence for the same AAV serotype. In some embodiments, the sequence variation comprises one or more of a substitution, deletion, insertion, inversion, or transposition. In some embodiments, the ITRs comprise or consist of at least 100, 101, 102, 103, 104, 105, 106, 107, 108, 109, 110, 111, 112, 113, 114, 115, 116, 117, 118, 119, 120, 121, 122, 123, 124, 125, 126, 127, 128, 129, 130, 131, 132, 133, 134, 135, 136, 137, 138, 139, 140, 141, 142, 143, 144, 145, 146, 147, 148, 149 or 150 base pairs. In some embodiments, the ITRs comprise or consist of 100, 101, 102, 103, 104, 105, 106, 107, 108, 109, 110, 111, 112, 113, 114, 115, 116, 117, 118, 119, 120, 121, 122, 123, 124, 125, 126, 127, 128, 129, 130, 131, 132, 133, 134, 135, 136, 137, 138, 139, 140, 141, 142, 143, 144, 145, 146, 147, 148, 149 or 150 base pairs. In some embodiments, the ITRs have a length of 110±10 base pairs. In some embodiments, the ITRs have a length of 120±10 base pairs. In some embodiments, the ITRs have a length of 130±10 base pairs. In some embodiments, the ITRs have a length of 140±10 base pairs. In some embodiments, the ITRs have a length of 150±10 base pairs. In some embodiments, the ITRs have a length of 115, 145, or 141 base pairs.

[0114] In some embodiments, the AAV-sgRNA vector may comprise additional elements to facilitate packaging of the vector and expression of the sgRNA. In some embodiments, the AAV-sgRNA vector may comprise a transposable element. In some embodiments, the AAV-sgRNA vector may comprise a regulatory element. In some embodiments, the regulatory element comprises an activator or a repressor. In some embodiments, the AAV-sgRNA sequence may comprise a non-functional or “stuffer” sequence. Exemplary stuffer sequences of the disclosure may have some (a non-zero percentage of) identity or homology to a genomic sequence of a mammal (including a human). Alternatively, exemplary stuffer sequences of the disclosure may have no identity or homology to a genomic sequence of a mammal (including a human). Exemplary stuffer sequences of the disclosure may comprise or consist of naturally occurring non-coding sequences or sequences that are neither transcribed nor translated following administration of the AAV vector to a subject.

[0115] In some embodiments, the AAV-sgRNA vector may be optimized for production in yeast, bacteria, insect cells, or mammalian cells. In some embodiments, the AAV-sgRNA vector may be optimized for expression in human cells. In some embodiments, the AAV-Cas9 vector may be optimized for expression in a baculovirus expression system.

[0116] In some embodiments, the AAV-sgRNA vector comprises at least one promoter. In some embodiments, the AAV-sgRNA vector comprises at least two promoters. In some embodiments, the AAV-sgRNA vector comprises at least three promoters. In some embodiments, the AAV-sgRNA vector comprises at least four promoters. In some embodiments, the AAV-sgRNA vector comprises at least five promoters. Exemplary promoters include, for example, immunoglobulin light chain, immunoglobulin heavy chain, T-cell receptor, HLA DQ a and/or DQ β, β-interferon, interleukin-2, interleukin-2 receptor, MHC class II 5, MHC class II HLA-Dra, β-Actin, muscle creatine kinase (MCK), prealbumin (transthyretin), elastase I, metallothionein (MTII), collagenase, albumin, α-fetoprotein, t-globin, β-globin, c-fos, c-HA-ras, insulin, neural cell adhesion molecule (NCAM), α₁-antitrypain, H2B (TH2B) histone, mouse and/or type I collagen, glucose-regulated proteins (GRP94 and GRP78), rat growth hormone, human serum amyloid A (SAA), troponin I (TN I), platelet-derived growth factor (PDGF), duchenne muscular dystrophy, SV40, polyoma, retroviruses, papilloma virus, hepatitis B virus, human immunodeficiency virus, cytomegalovirus (CMV), and gibbon ape leukemia virus. Further exemplary promoters include the U6 promoter, the H1 promoter, and the 7SK promoter.

[0117] In some embodiments, the sequence encoding the gRNA or the genomic target sequence comprises a sequence selected from SEQ ID NOs. 60-705, 712-862, and 947-2377.

### Pharmaceutical Compositions and Delivery Methods

[0118] Also provided herein are compositions comprising one or more vectors and/or nucleic acids of the disclosure. In some embodiments, the composition further comprises a pharmaceutically acceptable carrier.

[0119] For clinical applications, pharmaceutical compositions are prepared in a form appropriate for the intended application. Generally, this entails preparing compositions that are essentially free of pyrogens, as well as other impurities that could be harmful to humans or animals.

[0120] Appropriate salts and buffers are used to render drugs, proteins or delivery vectors stable and allow for uptake by target cells. Aqueous compositions of the present disclosure comprise an effective amount of the drug, vector or proteins, dissolved or dispersed in a pharmaceutically acceptable carrier or aqueous medium. The phrase “pharmaceutically or pharmacologically acceptable” refer to molecular entities and compositions that do not produce adverse, allergic, or other untoward reactions when administered to an animal or a human. As used herein, “pharmaceutically acceptable carrier” includes solvents, buffers, solutions, dispersion media, coatings, antibacterial and antifungal agents, isotonic and absorption delaying agents and the like acceptable for use in formulating pharmaceuticals, such as pharmaceuticals suitable for administration to humans. The use of such media and agents for pharmaceutically active substances is well known in the art. Any conventional media or agent that is not incompatible with the active ingredients of the present disclosure, its use in therapeutic compositions may be used. Supplementary active ingredients also can be incorporated into the compositions, provided they do not inactivate the vectors or cells of the compositions.

[0121] In some embodiments, the active compositions of the present disclosure may include classic pharmaceutical preparations. Administration of these compositions according to the present disclosure may be via any common route so long as the target tissue is available via that route, but generally including systemic administration. This includes oral, nasal, or buccal. Alternatively, administration may be by intradermal, subcutaneous, intramuscular, intraperitoneal or intravenous injection, or by direct injection into muscle tissue. Such compositions would normally be administered as pharmaceutically acceptable compositions, as described supra.

[0122] The active compounds may also be administered parenterally or intraperitoneally. By way of illustration, solutions of the active compounds as free base or pharmacologically acceptable salts can be prepared in water suitably mixed with a surfactant, such as hydroxypropylcellulose. Dispersions can also be prepared in glycerol, liquid polyethylene glycols, and mixtures thereof and in oils. Under ordinary conditions of storage and use, these preparations generally contain a preservative to prevent the growth of microorganisms.

[0123] The pharmaceutical forms suitable for injectable use include, for example, sterile aqueous solutions or dispersions and sterile powders for the extemporaneous preparation of sterile injectable solutions or dispersions. Generally, these preparations are sterile and fluid to the extent that easy injectability exists. Preparations should be stable under the conditions of manufacture and storage and should be preserved against the contaminating action of microorganisms, such as bacteria and fungi. Appropriate solvents or dispersion media may contain, for example, water, ethanol, polyol (for example, glycerol, propylene glycol, and liquid polyethylene glycol, and the like), suitable mixtures thereof, and vegetable oils. The proper fluidity can be maintained, for example, by the use of a coating, such as lecithin, by the maintenance of the required particle size in the case of dispersion and by the use of surfactants. The prevention of the action of microorganisms can be brought about by various antibacterial and antifungal agents, for example, parabens, chlorobutanol, phenol, sorbic acid, thimerosal, and the like. In many cases, it will be preferable to include isotonic agents, for example, sugars or sodium chloride. Prolonged absorption of the injectable compositions can be brought about by the use in the compositions of agents delaying absorption, for example, aluminum monostearate and gelatin.

[0124] Sterile injectable solutions may be prepared by incorporating the active compounds in an appropriate amount into a solvent along with any other ingredients (for example as enumerated above) as desired, followed by filtered sterilization. Generally, dispersions are prepared by incorporating the various sterilized active ingredients into a sterile vehicle which contains the basic dispersion medium and the desired other ingredients, e.g., as enumerated above. In the case of sterile powders for the preparation of sterile injectable solutions, the preferred methods of preparation include vacuum-drying and freeze-drying techniques which yield a powder of the active ingredient(s) plus any additional desired ingredient from a previously sterile-filtered solution thereof.

[0125] In some embodiments, the compositions of the present disclosure are formulated in a neutral or salt form. Pharmaceutically-acceptable salts include, for example, acid addition salts (formed with the free amino groups of the protein) derived from inorganic acids (e.g., hydrochloric or phosphoric acids, or from organic acids (e.g., acetic, oxalic, tartaric, mandelic, and the like. Salts formed with the free carboxyl groups of the protein can also be derived from inorganic bases (e.g., sodium, potassium, ammonium, calcium, or ferric hydroxides) or from organic bases (e.g., isopropylamine, trimethylamine, histidine, procaine) and the like.

[0126] Upon formulation, solutions are preferably administered in a manner compatible with the dosage formulation and in such amount as is therapeutically effective. The formulations may easily be administered in a variety of dosage forms such as injectable solutions, drug release capsules and the like. For parenteral administration in an aqueous solution, for example, the solution generally is suitably buffered and the liquid diluent first rendered isotonic for example with sufficient saline or glucose. Such aqueous solutions may be used, for example, for intravenous, intramuscular, subcutaneous and intraperitoneal administration. Preferably, sterile aqueous media are employed as is known to those of skill in the art, particularly in light of the present disclosure. By way of illustration, a single dose may be dissolved in 1 ml of isotonic NaCl solution and either added to 1000 ml of hypodermoclysis fluid or injected at the proposed site of infusion, (see for example, “Remington's Pharmaceutical Sciences” 15th Edition, pages 1035-1038 and 1570-1580). Some variation in dosage will necessarily occur depending on the condition of the subject being treated. The person responsible for administration will, in any event, determine the appropriate dose for the individual subject. Moreover, for human administration, preparations should meet sterility, pyrogenicity, general safety and purity standards as required by FDA Office of Biologics standards.

[0127] In some embodiments, the Cas9 or Cpf1 and gRNAs described herein may be delivered to the patient using adoptive cell transfer (ACT). In adoptive cell transfer, one or more expression constructs are provided ex vivo to cells which have originated from the patient (autologous) or from one or more individual(s) other than the patient (allogeneic). The cells are subsequently introduced or reintroduced into the patient. Thus, in some embodiments, one or more nucleic acids encoding Cas9 or Cpf1 and a guide RNA that targets a dystrophin splice site are provided to a cell ex vivo before the cell is introduced or reintroduced to a patient.

### Cells and Cell Compositions

[0128] Also provided is a cell comprising one or more nucleic acids of the disclosure. In some embodiments, the cell is a human cell. In some embodiments, the cell is a muscle cell or satellite cell. In some embodiments, the cell is an induced pluripotent stem (iPS) cell. In some embodiments, the cell is a cardiomyocyte. In some embodiments, the cell (e.g., a cardiomyocyte) is derived from an iPS cell.

[0129] Also provided is a cell comprising a composition comprising one or more vectors of the disclosure. In some embodiments, the cell is a human cell. In some embodiments, the cell is a muscle cell or satellite cell. In some embodiments, the cell is an induced pluripotent stem (iPS) cell. In some embodiments, the cell is a cardiomyocyte. In some embodiments, the cell (e.g., a cardiomyocyte) is derived from an iPS cell.

[0130] Also provided is a cell produced by one or more methods of the disclosure. In some embodiments, the cell is a human cell. In some embodiments, the cell is a muscle cell or satellite cell. In some embodiments, the cell is an induced pluripotent stem (iPS) cell. In some embodiments, the cell is a cardiomyocyte. In some embodiments, the cell (e.g., a cardiomyocyte) is derived from an iPS cell.

[0131] Also provided is a composition comprising a cell comprising one or more nucleic acids of the disclosure. In some embodiments, the composition further comprises a pharmaceutically acceptable carrier.

### Therapeutic Methods and Uses

[0132] The disclosure also provides methods for editing a dystrophin gene, such as a mutant dystrophin gene, in a cell. In some embodiments, the cell is a human cell. In some embodiments, the cell is a muscle cell or satellite cell. In some embodiments, the cell is an induced pluripotent stem (iPS) cell. In some embodiments, the cell is a cardiomyocyte. In some embodiments, the cell (e.g., a cardiomyocyte) is derived from an iPS cell.

[0133] In some embodiments, the disclosure provides a method for editing a mutant dystrophin gene in a cardiomyocyte, the method comprising contacting the cardiomyocyte with a Cas9 nuclease, or a sequence encoding a Cas9 nuclease, and a gRNA, or a sequence encoding a gRNA, wherein the gRNA targets a splice donor or splice acceptor site of the dystrophin gene. The mutant dystrophin gene may comprise one or more mutations, such as a point mutation (e.g., a pseudo-exon mutation), a deletion, and/or a duplication mutation. A deletion may be a deletion of at least 20, at least 50, at least 100, at least 500, at least 1000, at least 3000 nucleotides, at least 5000 nucleotides or at least 10,000 nucleotides. In some embodiments, the deletion comprises a deletion of one or more exons, one or more introns, or at least a portion of one intron and one exon.

[0134] In some embodiments, the disclosure provides a method for treating or preventing Duchenne Muscular Dystrophy (DMD) in a subject in need thereof, the method comprising administering to the subject a Cas9 nuclease, or a sequence encoding a Cas9 nuclease, and a gRNA, or a sequence encoding a gRNA, wherein the gRNA targets a splice donor or splice acceptor site of the dystrophin gene, wherein the administering restores dystrophin expression in at least 10% of the subject's cardiomyocytes. In some embodiments, the administering restores dystrophin expression in at least 20%, at least 30%, at least 40%, at least 50%, at least 60%, at least 70%, at least 80%, at least 90%, or at least 95% of the subject's cardiomyocytes. The average human heart has approximately 2 to 3 billion cardiomyocytes. Accordingly, in some embodiments, the administering restores dystrophin expression in at least 2×10⁸, at least 3×10⁸, at least 4×10⁸, at least 5×10⁸, at least 6×10⁸, at least 7×10⁸, at least 8×10⁸, at least 9×10⁸, at least 10×10⁸, at least 11×10⁸, at least 12×10⁸, at least 13×10⁸, at least 14×10⁸, at least 15×10⁸, at least 16×10⁸, at least 17×10⁸, at least 18×10⁸, at least 19×10⁸, at least 20×10⁸, at least 21×10⁸, at least 22×10⁸, at least 23×10⁸, at least 24×10⁸, at least 25×10⁸, at least 26×10⁸, at least 27×10⁸, at least 28×10⁸, at least 29×10⁸, at least 30×10⁸ of the subject's cardiomyocytes. In some embodiments, the subject suffers from dilated cardiomyopathy. In some embodiments, the administering at least partially rescues cardiac contractility, or completely rescues cardiac contractility.

[0135] In some embodiments, a method for treating or preventing Duchenne Muscular Dystrophy (DMD) in a subject in need thereof, is provided, the method comprising contacting an induced pluripotent stem cell (iPSC) with a Cas9 nuclease or a sequence encoding a Cas9 nuclease, and a gRNA or a sequence encoding a gRNA, wherein the gRNA targets a splice donor or splice acceptor site of the dystrophin gene; differentiating the iPSC into a cardiomyocyte; and administering the cardiomyocyte to the subject. In some embodiments, at least 1×10³, at least 1×10⁴, at least 1×10⁵, at least 1×10⁶, at least 1×10⁷ or at least 1×10⁸ cardiomyocytes are administered to the patient.

[0136] The gRNA may target, for example a splice donor or splice acceptor site of exon 51, 45, 53, 44, 46, 52, 50, 43, 6, 7, 8, or 55 of the cardiomyocyte dystrophin gene. In some embodiments, the gRNA or the genomic targeting sequence has a sequence of any one of SEQ ID NOs. 60-705, 712-862, 947-2377. The cas9 nuclease may be isolated or derived from, for example, a S. pyogenes (spCas9) or a S. aureus cas9 (saCas9).

[0137] In some embodiments, a vector comprising the gRNA, or a sequence encoding the gRNA, is contacted with the cardiomyocyte. The vector may be, for example, non-viral vector such as a plasmid or a nanoparticle. In some embodiments, the vector may be a viral vector, such as an adeno-associated viral (AAV) vector. In some embodiments, the AAV vector is selected from AAV1, AAV2, AAV3, AAV4, AAV5, AAV6, AAV7, AAV8, AAV9, AAV10, AAV11, AAV12, AAVRh74, AAV2i8, AAVRh10, AAV39, AAV43, AAVRh8, avian AAV, bovine AAV, canine AAV, equine AAV, and ovine AAV.

[0138] In some embodiments, a single vector comprising the Cas9 nuclease, or a sequence encoding the Cas9 nuclease, and the gRNA, or a sequence encoding the gRNA, are contacted with the cardiomyocyte. In other embodiments, a first vector comprising the Cas9 nuclease, or a sequence encoding the Cas9 nuclease, and a second vector comprising the gRNA or a sequence encoding the gRNA, are contacted with the cardiomyocyte. The first and second vector may be the same or may be different. For example, the first vector and the second vector may both be AAVs, or the first vector may be an AAV and the second vector may be a plasmid.

[0139] Also provided is a method for correcting a dystrophin defect, the method comprising contacting a cell with one or more compositions of the disclosure under conditions suitable for expression of the guide RNA, the Cas9 protein or a nuclease domain thereof, wherein the guide RNA forms a complex with the Cas9 protein or the nuclease domain thereof to form at least one guide RNA-Cas9 complex, wherein the at least one guide RNA-Cas9 complex disrupts a dystrophin splice site and induces selective skipping of a DMD exon and/or reframing. In some embodiments, the at least one guide RNA-Cas9 complex disrupts a dystrophin splice site and induces a reframing of a dystrophin reading frame. In some embodiments, the at least one guide RNA-Cas9 complex disrupts a dystrophin splice site and produces an insertion which restores the dystrophin protein reading frame. In some embodiments, the insertion comprises an insertion of a single adenosine.

[0140] Also provided is a method for inducing selective skipping and/or reframing of a DMD exon, the method comprising contacting a cell with one or more compositions of the disclosure under conditions suitable for expression of the guide RNA and the Cas9 protein or a nuclease domain thereof, wherein the guide RNA and the second guide RNA form a complex with the Cas9 protein or the nuclease domain thereof to form at least one guide RNA-Cas9 complex, wherein the at least one guide RNA-Cas9 complex disrupts a dystrophin splice site and induces selective skipping and/or reframing of a DMD exon.

[0141] Also provided is a method for inducing a reframing event in the dystrophin reading frame, the method comprising contacting a cell with one or more compositions of the disclosure under conditions suitable for expression of the guide RNA and the Cas9 protein or a nuclease domain thereof, wherein the guide RNA forms a complex with the Cas9 protein or the nuclease domain thereof to form at least one guide RNA-Cas9 complex, wherein the guide RNA-Cas9 complex disrupts a dystrophin splice site and induces selective skipping and/or reframing of a DMD exon. In some embodiments, the at least one guide RNA-Cas9 complex disrupts a dystrophin splice site and induces selective skipping and/or reframing of exon 51 of a human DMD gene.

[0142] Also provided is a method of treating or preventing muscular dystrophy in a subject in need thereof comprising administering to the subject a therapeutically effective amount of one or more compositions of the disclosure. In some embodiments, the composition is administered locally. In some embodiments, the composition is administered directly to a muscle tissue. In some embodiments, the composition is administered by an intramuscular infusion or injection. In some embodiments, the muscle tissue comprises a tibialis anterior tissue, a quadriceps tissue, a soleus tissue, a diaphragm tissue, or a heart tissue. In some embodiments, the composition is administered by an intra-cardiac injection. In some embodiments, the composition is administered systemically. In some embodiments, the composition is administered by an intravenous infusion or injection. In some embodiments, following administration of the composition, the subject exhibits normal dystrophin-positive myofibers, and mosaic dystrophin-positive myofibers containing centralized nuclei, or a combination thereof. In some embodiments, following administration of the composition, the subject exhibits an emergence or an increase in a level of abundance of normal dystrophin-positive myofibers when compared to an absence or a level of abundance of normal dystrophin-positive myofibers prior to administration of the composition. In some embodiments, following administration of the composition, the subject exhibits an emergence or an increase in a level of abundance of mosaic dystrophin-positive myofibers containing centralized nuclei when compared to an absence or an level of abundance of mosaic dystrophin-positive myofibers containing centralized nuclei prior to administration of the composition. In some embodiments, following administration of the composition, the subject exhibits a decreased serum CK level when compared to a serum CK level prior to administration of the composition. In some embodiment, following administration of the composition, the subject exhibits improved grip strength when compared to a grip strength prior to administration of the composition. In some embodiments, the subject is a neonate, an infant, a child, a young adult, or an adult. In some embodiments, the subject has muscular dystrophy. In some embodiments, the subject is a genetic carrier for muscular dystrophy. In some embodiments, the subject is male. In some embodiments, the subject is female. In some embodiments, the subject appears to be asymptomatic and a genetic diagnosis reveals a mutation in one or both copies of a DMD gene that impairs function of the DMD gene product. In some embodiments, the subject presents an early sign or symptom of muscular dystrophy. In some embodiments, the early sign or symptom of muscular dystrophy comprises loss of muscle mass or proximal muscle weakness. In some embodiments, the loss of muscle mass or proximal muscle weakness occurs in one or both leg(s) and/or a pelvis, followed by one or more upper body muscle(s). In some embodiments, the early sign or symptom of muscular dystrophy further comprises pseudohypertrophy, low endurance, difficulty standing, difficulty walking, difficulty ascending a staircase or a combination thereof. In some embodiments, the subject presents a progressive sign or symptom of muscular dystrophy. In some embodiments, the progressive sign or symptom of muscular dystrophy comprises muscle tissue wasting, replacement of muscle tissue with fat, or replacement of muscle tissue with fibrotic tissue. In some embodiments, the subject presents a later sign or symptom of muscular dystrophy. In some embodiments, the later sign or symptom of muscular dystrophy comprises abnormal bone development, curvature of the spine, loss of movement, and paralysis. In some embodiments, the subject presents a neurological sign or symptom of muscular dystrophy. In some embodiments, the neurological sign or symptom of muscular dystrophy comprises intellectual impairment and paralysis. In some embodiments, administration of the composition occurs prior to the subject presenting one or more progressive, later or neurological signs or symptoms of muscular dystrophy. In some embodiments, the subject greater than 18 years old, greater than 25 years old, or greater than 30 years old. In some embodiments, the subject is less than 18 years old, less than 16 years old, less than 12 years old, less than 10 years old, less than 5 years old, or less than 2 years old. Also provided is the use of a therapeutically-effective amount of one or more compositions of the disclosure for treating muscular dystrophy in a subject in need thereof.

### Delivery Vectors

[0143] There are a number of ways in which expression vectors may be introduced into cells. In certain embodiments, the expression construct comprises a virus or engineered construct derived from a viral genome. The ability of certain viruses to enter cells via receptor-mediated endocytosis, to integrate into host cell genome and express viral genes stably and efficiently have made them attractive candidates for the transfer of foreign genes into mammalian cells. These have a relatively low capacity for foreign DNA sequences and have a restricted host spectrum. Furthermore, their oncogenic potential and cytopathic effects in permissive cells raise safety concerns. They can accommodate only up to 8 kB of foreign genetic material but can be readily introduced in a variety of cell lines and laboratory animals.

[0144] One of the preferred methods for in vivo delivery involves the use of an adenovirus expression vector. “Adenovirus expression vector” is meant to include those constructs containing adenovirus sequences sufficient to (a) support packaging of the construct and (b) to express an antisense polynucleotide that has been cloned therein. In this context, expression does not require that the gene product be synthesized.

[0145] The expression vector comprises a genetically engineered form of adenovirus. Knowledge of the genetic organization of adenovirus, a 36 kB, linear, double-stranded DNA virus, allows substitution of large pieces of adenoviral DNA with foreign sequences up to 7 kB. In contrast to retrovirus, the adenoviral infection of host cells does not result in chromosomal integration because adenoviral DNA can replicate in an episomal manner without potential genotoxicity. Also, adenoviruses are structurally stable, and no genome rearrangement has been detected after extensive amplification. Adenovirus can infect virtually all epithelial cells regardless of their cell cycle stage. So far, adenoviral infection appears to be linked only to mild disease such as acute respiratory disease in humans.

[0146] Adenovirus is particularly suitable for use as a gene transfer vector because of its mid-sized genome, ease of manipulation, high titer, wide target cell range and high infectivity. Both ends of the viral genome contain 100-200 base pair inverted repeats (ITRs), which are cis elements necessary for viral DNA replication and packaging. The early (E) and late (L) regions of the genome contain different transcription units that are divided by the onset of viral DNA replication. The E1 region (E1A and E1B) encodes proteins responsible for the regulation of transcription of the viral genome and a few cellular genes. The expression of the E2 region (E2A and E2B) results in the synthesis of the proteins for viral DNA replication. These proteins are involved in DNA replication, late gene expression and host cell shut-off. The products of the late genes, including the majority of the viral capsid proteins, are expressed only after significant processing of a single primary transcript issued by the major late promoter (MLP). The MLP, (located at 16.8 m.u.) is particularly efficient during the late phase of infection, and all the mRNAs issued from this promoter possess a 5′-tripartite leader (TPL) sequence which makes them preferred mRNAs for translation. In one system, recombinant adenovirus is generated from homologous recombination between shuttle vector and provirus vector. Due to the possible recombination between two proviral vectors, wild-type adenovirus may be generated from this process. Therefore, it is critical to isolate a single clone of virus from an individual plaque and examine its genomic structure.

[0147] Generation and propagation of the current adenovirus vectors, which are replication deficient, depend on a unique helper cell line, designated 293, which was transformed from human embryonic kidney cells by Ad5 DNA fragments and constitutively expresses E1 proteins. Since the E3 region is dispensable from the adenovirus genome, the current adenovirus vectors, with the help of 293 cells, carry foreign DNA in either the E1, the D3 or both regions. In nature, adenovirus can package approximately 105% of the wild-type genome, providing capacity for about 2 extra kb of DNA. Combined with the approximately 5.5 kb of DNA that is replaceable in the E1 and E3 regions, the maximum capacity of the current adenovirus vector is under 7.5 kb, or about 15% of the total length of the vector. More than 80% of the adenovirus viral genome remains in the vector backbone and is the source of vector-borne cytotoxicity. Also, the replication deficiency of the E1-deleted virus is incomplete.

[0148] Helper cell lines may be derived from human cells such as human embryonic kidney cells, muscle cells, hematopoietic cells or other human embryonic mesenchymal or epithelial cells. Alternatively, the helper cells may be derived from the cells of other mammalian species that are permissive for human adenovirus. Such cells include, e.g., Vero cells or other monkey embryonic mesenchymal or epithelial cells. As stated above, the preferred helper cell line is 293.

[0149] Improved methods for culturing 293 cells and propagating adenovirus are known in the art. In one format, natural cell aggregates are grown by inoculating individual cells into 1 liter siliconized spinner flasks (Techne, Cambridge, UK) containing 100-200 ml of medium. Following stirring at 40 rpm, the cell viability is estimated with trypan blue. In another format, Fibra-Cel microcarriers (Bibby Sterlin, Stone, UK) (5 g/l) is employed as follows. A cell inoculum, resuspended in 5 ml of medium, is added to the carrier (50 ml) in a 250 ml Erlenmeyer flask and left stationary, with occasional agitation, for 1 to 4 h. The medium is then replaced with 50 ml of fresh medium and shaking initiated. For virus production, cells are allowed to grow to about 80% confluence, after which time the medium is replaced (to 25% of the final volume) and adenovirus added at an MOI of 0.05. Cultures are left stationary overnight, following which the volume is increased to 100% and shaking commenced for another 72 h.

[0150] The adenoviruses of the disclosure are replication defective, or at least conditionally replication defective. The adenovirus may be of any of the 42 different known serotypes or subgroups A-F. Adenovirus type 5 of subgroup C is the preferred starting material in order to obtain the conditional replication-defective adenovirus vector for use in the present disclosure.

[0151] As stated above, the typical vector according to the present disclosure is replication defective and will not have an adenovirus E1 region. Thus, it will be most convenient to introduce the polynucleotide encoding the gene of interest at the position from which the E1-coding sequences have been removed. However, the position of insertion of the construct within the adenovirus sequences is not critical. The polynucleotide encoding the gene of interest may also be inserted in lieu of the deleted E3 region in E3 replacement vectors, or in the E4 region where a helper cell line or helper virus complements the E4 defect.

[0152] Adenovirus is easy to grow and manipulate and exhibits broad host range in vitro and in vivo. This group of viruses can be obtained in high titers, e.g., 10⁹-10¹² plaque-forming units per ml, and they are highly infective. The life cycle of adenovirus does not require integration into the host cell genome. The foreign genes delivered by adenovirus vectors are episomal and, therefore, have low genotoxicity to host cells. No side effects have been reported in studies of vaccination with wild-type adenovirus, demonstrating their safety and therapeutic potential as in vivo gene transfer vectors.

[0153] Adenovirus vectors have been used in eukaryotic gene expression and vaccine development. Animal studies suggested that recombinant adenovirus could be used for gene therapy. Studies in administering recombinant adenovirus to different tissues include trachea instillation, muscle injection, peripheral intravenous injections and stereotactic inoculation into the brain.

[0154] The retroviruses are a group of single-stranded RNA viruses characterized by an ability to convert their RNA to double-stranded DNA in infected cells by a process of reverse-transcription. The resulting DNA then stably integrates into cellular chromosomes as a provirus and directs synthesis of viral proteins. The integration results in the retention of the viral gene sequences in the recipient cell and its descendants. The retroviral genome contains three genes, gag, pol, and env that code for capsid proteins, polymerase enzyme, and envelope components, respectively. A sequence found upstream from the gag gene contains a signal for packaging of the genome into virions. Two long terminal repeat (LTR) sequences are present at the 5′ and 3′ ends of the viral genome. These contain strong promoter and enhancer sequences and are also required for integration in the host cell genome.

[0155] In order to construct a retroviral vector, a nucleic acid encoding a gene of interest is inserted into the viral genome in the place of certain viral sequences to produce a virus that is replication-defective. In order to produce virions, a packaging cell line containing the gag, pol, and env genes but without the LTR and packaging components is constructed. When a recombinant plasmid containing a cDNA, together with the retroviral LTR and packaging sequences is introduced into this cell line (by calcium phosphate precipitation for example), the packaging sequence allows the RNA transcript of the recombinant plasmid to be packaged into viral particles, which are then secreted into the culture media. The media containing the recombinant retroviruses is then collected, optionally concentrated, and used for gene transfer. Retroviral vectors are able to infect a broad variety of cell types. However, integration and stable expression require the division of host cells.

[0156] A novel approach designed to allow specific targeting of retrovirus vectors was recently developed based on the chemical modification of a retrovirus by the chemical addition of lactose residues to the viral envelope. This modification could permit the specific infection of hepatocytes via sialoglycoprotein receptors.

[0157] A different approach to targeting of recombinant retroviruses may be used, in which biotinylated antibodies against a retroviral envelope protein and against a specific cell receptor are used. The antibodies are coupled via the biotin components by using streptavidin. Using antibodies against major histocompatibility complex class I and class II antigens, it has been demonstrated the infection of a variety of human cells that bore those surface antigens with an ecotropic virus in vitro.

[0158] There are certain limitations to the use of retrovirus vectors in all aspects of the present disclosure. For example, retrovirus vectors usually integrate into random sites in the cell genome. This can lead to insertional mutagenesis through the interruption of host genes or through the insertion of viral regulatory sequences that can interfere with the function of flanking genes. Another concern with the use of defective retrovirus vectors is the potential appearance of wild-type replication-competent virus in the packaging cells. This can result from recombination events in which the intact-sequence from the recombinant virus inserts upstream from the gag, pol, env sequence integrated in the host cell genome. However, new packaging cell lines are now available that should greatly decrease the likelihood of recombination (see, for example, Markowitz et al., 1988; Hersdorffer et al., 1990).

[0159] Other viral vectors may be employed as expression constructs in the present disclosure. Vectors derived from viruses such as vaccinia virus adeno-associated virus (AAV) and herpesviruses may be employed. They offer several attractive features for various mammalian cells.

[0160] In embodiments, the AAV vector is replication-defective or conditionally replication defective. In embodiments, the AAV vector is a recombinant AAV vector. In some embodiments, the AAV vector comprises a sequence isolated or derived from an AAV vector of serotype AAV1, AAV2, AAV3, AAV4, AAV5, AAV6, AAV7, AAV8, AAV9, AAV10, AAV11, AAV12, AAVRh74, AAV2i8, AAVRh10, AAV39, AAV43, AAVRh8, avian AAV, bovine AAV, canine AAV, equine AAV, or ovine AAV or any combination thereof.

[0161] In some embodiments, a single viral vector is used to deliver a nucleic acid encoding a Cas9 or a Cpf1 and at least one gRNA to a cell. In some embodiments, Cas9 or Cpf1 is provided to a cell using a first viral vector and at least one gRNA is provided to the cell using a second viral vector.

[0162] In some embodiments, a single viral vector is used to deliver a nucleic acid encoding Cas9 or Cpf1 and at least one gRNA to a cell. In some embodiments, Cas9 or Cpf1 is provided to a cell using a first viral vector and at least one gRNA is provided to the cell using a second viral vector. In order to effect expression of sense or antisense gene constructs, the expression construct must be delivered into a cell. The cell may be a muscle cell, a satellite cell, a mesangioblast, a bone marrow derived cell, a stromal cell or a mesenchymal stem cell. In embodiments, the cell is a cardiac muscle cell, a skeletal muscle cell, or a smooth muscle cell. In embodiments, the cell is a cell in the tibialis anterior, quadriceps, soleus, diaphragm or heart. In some embodiments, the cell is an induced pluripotent stem cell (iPSC) or inner cell mass cell (iCM). In further embodiments, the cell is a human iPSC or a human iCM. In some embodiments, human iPSCs or human iCMs of the disclosure may be derived from a cultured stem cell line, an adult stem cell, a placental stem cell, or from another source of adult or embryonic stem cells that does not require the destruction of a human embryo. Delivery to a cell may be accomplished in vitro, as in laboratory procedures for transforming cells lines, or in vivo or ex vivo, as in the treatment of certain disease states. One mechanism for delivery is via viral infection where the expression construct is encapsidated in an infectious viral particle.

[0163] Several non-viral methods for the transfer of expression constructs into cultured mammalian cells also are contemplated by the present disclosure. These include calcium phosphate precipitation, DEAE-dextran, electroporation, direct microinjection, DNA-loaded liposomes and lipofectamine-DNA complexes, cell sonication, gene bombardment using high velocity microprojectiles, and receptor-mediated transfection. Some of these techniques may be successfully adapted for in vivo or ex vivo use.

[0164] Once the expression construct has been delivered into the cell the nucleic acid encoding the gene of interest may be positioned and expressed at different sites. In certain embodiments, the nucleic acid encoding the gene may be stably integrated into the genome of the cell. This integration may be in the cognate location and orientation via homologous recombination (gene replacement) or it may be integrated in a random, non-specific location (gene augmentation). In yet further embodiments, the nucleic acid may be stably maintained in the cell as a separate, episomal segment of DNA. Such nucleic acid segments or “episomes” encode sequences sufficient to permit maintenance and replication independent of or in synchronization with the host cell cycle. How the expression construct is delivered to a cell and where in the cell the nucleic acid remains is dependent on the type of expression construct employed.

[0165] In yet another embodiment, the expression construct may simply consist of naked recombinant DNA or plasmids. Transfer of the construct may be performed by any of the methods mentioned above which physically or chemically permeabilize the cell membrane. This is particularly applicable for transfer in vitro but it may be applied to in vivo use as well.

[0166] In still another embodiment for transferring a naked DNA expression construct into cells may involve particle bombardment. This method depends on the ability to accelerate DNA-coated microprojectiles to a high velocity allowing them to pierce cell membranes and enter cells without killing them. Several devices for accelerating small particles have been developed. One such device relies on a high voltage discharge to generate an electrical current, which in turn provides the motive force. The microprojectiles used have consisted of biologically inert substances such as tungsten or gold beads.

[0167] In some embodiments, the expression construct is delivered directly to the liver, skin, and/or muscle tissue of a subject. This may require surgical exposure of the tissue or cells, to eliminate any intervening tissue between the gun and the target organ, i.e., ex vivo treatment.

[0168] Again, DNA encoding a particular gene may be delivered via this method and still be incorporated by the present disclosure.

[0169] In a further embodiment, the expression construct may be entrapped in a liposome. Liposomes are vesicular structures characterized by a phospholipid bilayer membrane and an inner aqueous medium. Multilamellar liposomes have multiple lipid layers separated by aqueous medium. They form spontaneously when phospholipids are suspended in an excess of aqueous solution. The lipid components undergo self-rearrangement before the formation of closed structures and entrap water and dissolved solutes between the lipid bilayers. Also contemplated are lipofectamine-DNA complexes.

[0170] Liposome-mediated nucleic acid delivery and expression of foreign DNA in vitro has been very successful. A reagent known as Lipofectamine 2000′ is widely used and commercially available.

[0171] In certain embodiments, the liposome may be complexed with a hemagglutinating virus (HVJ) to facilitate fusion with the cell membrane and promote cell entry of liposome-encapsulated DNA. In other embodiments, the liposome may be complexed or employed in conjunction with nuclear non-histone chromosomal proteins (HMG-1). In yet further embodiments, the liposome may be complexed or employed in conjunction with both HVJ and HMG-1. In that such expression constructs have been successfully employed in transfer and expression of nucleic acid in vitro and in vivo, then they are applicable for the present disclosure. Where a bacterial promoter is employed in the DNA construct, it also will be desirable to include within the liposome an appropriate bacterial polymerase.

[0172] Other expression constructs which can be employed to deliver a nucleic acid encoding a particular gene into cells are receptor-mediated delivery vehicles. These take advantage of the selective uptake of macromolecules by receptor-mediated endocytosis in almost all eukaryotic cells. Because of the cell type-specific distribution of various receptors, the delivery can be highly specific.

[0173] Receptor-mediated gene targeting vehicles generally consist of two components: a cell receptor-specific ligand and a DNA-binding agent. Several ligands have been used for receptor-mediated gene transfer. The most extensively characterized ligands are asialoorosomucoid (ASOR) and transferrin. A synthetic neoglycoprotein, which recognizes the same receptor as ASOR, has been used as a gene delivery vehicle and epidermal growth factor (EGF) has also been used to deliver genes to squamous carcinoma cells.

### Duchenne Muscular Dystrophy

[0174] Duchenne muscular dystrophy (DMD) is a recessive X-linked form of muscular dystrophy, affecting around 1 in 5000 boys, which results in muscle degeneration and premature death. The disorder is caused by a mutation in the gene dystrophin (see GenBank Accession NO. NC_000023.11), located on the human X chromosome, which codes for the protein dystrophin (GenBank Accession No. AAA53189; SEQ ID NO: 5).

[0175] In humans, dystrophin mRNA contains 79 exons. Dystrophin mRNA is known to be alternatively spliced, resulting in various isoforms. Exemplary dystrophin isoforms are listed in Table 1.

[0176] The murine dystrophin protein has the following amino acid sequence (Uniprot Accession No. P11531, SEQ. ID. NO: 869):

| | |
|---|---|
| 1 | MWWVDCYRDV KKTTKWNASK GKHDNSDDGK RDGTGKKKGS TRVHANNVNK ARVKNNVDVN |
| 61 | GSTDVDGNHK TGWNHWVKNV MKTMAGTNSK SWVRSTRNYV NVNTSSWSDG ANAHSHRDDW |
| 121 | NSVVSHSATR HANAKCGKDD VATTYDKKSM YTSVVSAVMR TSSKVTRHHH MHYSTVSAGY |
| 181 | TSSSKRKSYA TAAYVATSDS TSYSHARDKS DSSMTVNDSY TAVSWSADTR AGSNDVVKHA |
| 241 | HGMMDTSHGV GNVGSVGKGK SDAVMNNSRW CRVASMKSKH KVMDNKKDDW TKTRTKKMGD |
| 301 | DKCVHKVDVR VNSTHMVVVV DSSGDHATAA KVGDRWANCR WTDRWVDKWH TCSTWSKDAM |
| 361 | KNTSGKDNMM SSHKSTKDKK KTMKSSNDSA KNKSVTKMWM NARWDNTKKS SASAVTTTST |
| 421 | TTVMTVTMVT TRMVKHAKKR TVDSRKRDVD THSWTRSAVS SAVYRKGNSD KVNAARKAKR |
| 481 | KDASRSAAVM ANGVNASRAS NSRWTCSRVN WYTNTYNMTT TANKTSTTST AKSKCKDVNR |
| 541 | SAKSKKGGMD ADVATNHNHD GVRAKKTDTM RYTMSSRTWS SKSVYSVTYM RGKASSKNGN |
| 601 | YSDTVKMAKK ASCKYSGHWK KSSVSCKHMN KRKNHKTKWM AVDVKWAGDA KKKCRVGDTS |
| 661 | NSVNGGKKSA ASRTRNTWDH CRVYTRKAKA GDKTVSKDSM HWMTAYRDYK TDTAVMKRAK |
| 721 | AKTKVKTTVN SVAHASAAKK TTTNYWCTRN GKCKTVWACW HSYKANKWNV KKTMNVAGTV |
| 781 | SNMHHSNNRA TTDGGVMDNT NSRWRHAVRK KSSAKSHSDK AAYTDKVDAA MAKSDTSHSM |
| 841 | KKHNGKDANR VSDVAKKDVS MKRKANRSKM DVKMHATKSV VSSHCVNYKS SVKSVMVKTG |
| 901 | RVKKTNKDRV TAKHYNGAKV TRKKCKSRKM RKMNVTWAAT DTTKRSAVGM SNDSVAWGKA |
| 961 | TKKKAHKSVT GSKMVGKKTV DKSNSNWAVT SRVWNYKHMT DNTKWHADDS KKKKDKRKAM |
| 1021 | NDMRKVDSTR DAAKMANRGD HCRKVVSNRR AASHRKTGKA SKNSDKAGVN KDNKDMSDNG |
| 1081 | TVNRGDNRTD RKRKKTKHNA KDRSRRKKAS HWYYKRADDK CDKKASRDRK KDRKKKNAVR |
| 1141 | RAGSNGAAMA VTSKRWRSNA RRNAHTHTMV VTTDMDVSYV STYTSHASVD HNTCAKDDKS |
| 1201 | KNKDNSGRDH KKKTAASATS MKVKVAVAMD GKHRMYKRGR DRSVKWRHHY DMKVNWNVKK |
| 1261 | TNNWHAKYKW YKDGGRAVVR TNATGSSKTD VNKGSSRWHD CKARRKRKNV SRDNVWADNA |
| 1321 | TGDKVKARGK NTGGAVVSAR DKKKKTNWKV SRAKGVHKDR DHWSRNYNSA GDKVTVHGKA |
| 1381 | DVRSKGHYKK STVKRKDRSW AVNHRRTKDR AGSTTGASAS TVTVTSVVTK TVSKMSSVAA |
| 1441 | DNRAWTTDWS DRVKSRVMVG DDNMKKATDR RTAANKNKTS NARTTDRRWD VNRRNMKDST |
| 1501 | WAKAVGVRGK DSWKGHTVDA KKTTKAKDRR SVDVANDAKR DYSADDTRKV HMTNNTSWGN |
| 1561 | HKRVSAATHR DKSWTATTAN VDASRKKDSR GVRMKWDGTH TDYHNDNGKR SGSDARRDNM |
| 1621 | NKWSKKSNRS HASSDWKRHS VWKDDSRAGG DAVKNDHRAK RKTKVMSTTV RTGKYRRANV |
| 1681 | TRRKAVNAWD KNRSADWRKD ARAADDKRAV KGSWVGDDSD HKVKARGAKN VNRVNDAHTT |
| 1741 | GSYNSTDNTR WRVAVDRVRH AHRDGASHST SVGWRASNKV YYNHTTTCWD HKMTYSADNN |
| 1801 | VRSAYRTAMK RRKACDSSAA CDADHNKNDM DNCTTYDRHN NVNVCVDMCN WNVYDTGRTG |
| 1861 | RRVSKTGSCK AHDKYRYKVA SSTGCDRRGH DSRGVASGGS NSVRSCANNK AADWMRSMVW |
| 1921 | VHRVAAATAK HAKCNCKCGR YRSKHNYDCS CSGRVAKGHK MHYMVYCTTT SGDVRDAKVK |
| 1981 | NKRTKRYAKH RMGYVTVGDN MTVTNWVDSA ASSSHDDTHS RHYASRAMNS NGSYNDSSNS |
| 2041 | DDHHYCSNDS SRSASSRGRA DNRNAYDRKH HKGSSMMTSS RDAAAKRHKG RARMDHNKSH |
| 2101 | RRAAKVNGTT VSSSTSRSDS SMRVVGSTSS MGDSDTSTGV MNNSSSRGRN AGKMRDTM |

[0177] Dystrophin is an important component within muscle tissue that provides structural stability to the dystroglycan complex (DGC) of the cell membrane. While both sexes can carry the mutation, females are rarely affected with the skeletal muscle form of the disease.

[0178] Mutations vary in nature and frequency. Large genetic deletions are found in about 60-70% of cases, large duplications are found in about 10% of cases, and point mutants or other small changes account for about 15-30% of cases. Bladen et al. (2015), who examined some 7000 mutations, catalogued a total of 5,682 large mutations (80% of total mutations), of which 4,894 (86%) were deletions (1 exon or larger) and 784 (14%) were duplications (1 exon or larger). There were 1,445 small mutations (smaller than 1 exon, 20% of all mutations), of which 358 (25%) were small deletions and 132 (9%) small insertions, while 199 (14%) affected the splice sites. Point mutations totaled 756 (52% of small mutations) with 726 (50%) nonsense mutations and 30 (2%) missense mutations. Finally, 22 (0.3%) mid-intronic mutations were observed. In addition, mutations were identified within the database that would potentially benefit from novel genetic therapies for DMD including stop codon read-through therapies (10% of total mutations) and exon skipping therapy (80% of deletions and 55% of total mutations).

[0179] DMD Subject Characteristics and Clinical Presentation.

[0180] Symptoms usually appear in boys between the ages of 2 and 3 and may be visible in early infancy. Even though symptoms do not appear until early infancy, laboratory testing can identify children who carry the active mutation at birth. Progressive proximal muscle weakness of the legs and pelvis associated with loss of muscle mass is observed first. Eventually this weakness spreads to the arms, neck, and other areas. Early signs may include pseudohypertrophy (enlargement of calf and deltoid muscles), low endurance, and difficulties in standing unaided or inability to ascend staircases. As the condition progresses, muscle tissue experiences wasting and is eventually replaced by fat and fibrotic tissue (fibrosis). By age 10, braces may be required to aid in walking but most patients are wheelchair dependent by age 12. Later symptoms may include abnormal bone development that lead to skeletal deformities, including curvature of the spine. Due to progressive deterioration of muscle, loss of movement occurs, eventually leading to paralysis. Intellectual impairment may or may not be present but if present, does not progressively worsen as the child ages. The average life expectancy for males afflicted with DMD is around 25.

[0181] The main symptom of Duchenne muscular dystrophy, a progressive neuromuscular disorder, is muscle weakness associated with muscle wasting with the voluntary muscles being first affected, especially those of the hips, pelvic area, thighs, shoulders, and calves. Muscle weakness also occurs later, in the arms, neck, and other areas. Calves are often enlarged. Symptoms usually appear before age 6 and may appear in early infancy. Other physical symptoms are:
[0182] 1. Awkward manner of walking, stepping, or running—(patients tend to walk on their forefeet, because of an increased calf muscle tone. Also, toe walking is a compensatory adaptation to knee extensor weakness.)
[0183] 2. Frequent falls.
[0184] 3. Fatigue.
[0185] 4. Difficulty with motor skills (running, hopping, jumping).
[0186] 5. Lumbar hyperlordosis, possibly leading to shortening of the hip-flexor muscles. This has an effect on overall posture and a manner of walking, stepping, or running.
[0187] 6. Muscle contractures of Achilles tendon and hamstrings impair functionality because the muscle fibers shorten and fibrose in connective tissue.
[0188] 7. Progressive difficulty walking.
[0189] 8. Muscle fiber deformities.
[0190] 9. Pseudohypertrophy (enlarging) of tongue and calf muscles. The muscle tissue is eventually replaced by fat and connective tissue, hence the term pseudohypertrophy.
[0191] 10. Higher risk of neurobehavioral disorders (e.g., ADHD), learning disorders (dyslexia), and non-progressive weaknesses in specific cognitive skills (in particular short-term verbal memory), which are believed to be the result of absent or dysfunctional dystrophin in the brain.
[0192] 11. Eventual loss of ability to walk (usually by the age of 12).
[0193] 12. Skeletal deformities (including scoliosis in some cases).
[0194] 13. Trouble getting up from lying or sitting position.

[0195] The condition can often be observed clinically from the moment the patient takes his first steps, and the ability to walk usually completely disintegrates between the time the boy is 9 to 12 years of age. Most men affected with DMD become essentially “paralyzed from the neck down” by the age of 21. Muscle wasting begins in the legs and pelvis, then progresses to the muscles of the shoulders and neck, followed by loss of arm muscles and respiratory muscles. Calf muscle enlargement (pseudohypertrophy) is quite obvious. Cardiomyopathy particularly (dilated cardiomyopathy) is common, but the development of congestive heart failure or arrhythmia (irregular heartbeat) is only occasional.

[0196] A positive Gowers' sign reflects the more severe impairment of the lower extremities muscles. The child helps himself to get up with upper extremities: first by rising to stand on his arms and knees, and then “walking” his hands up his legs to stand upright. Affected children usually tire more easily and have less overall strength than their peers. Creatine kinase (CPK-MM) levels in the bloodstream are extremely high. An electromyography (EMG) shows that weakness is caused by destruction of muscle tissue rather than by damage to nerves. Genetic testing can reveal genetic errors in the Xp21 gene. A muscle biopsy (immunohistochemistry or immunoblotting) or genetic test (blood test) confirms the absence of dystrophin, although improvements in genetic testing often make this unnecessary.

[0197] DMD patients may suffer from:
[0198] 1. Abnormal heart muscle (cardiomyopathy).
[0199] 2. Congestive heart failure or irregular heart rhythm (arrhythmia).
[0200] 3. Deformities of the chest and back (scoliosis).
[0201] 4. Enlarged muscles of the calves, buttocks, and shoulders (around age 4 or 5). These muscles are eventually replaced by fat and connective tissue (pseudohypertrophy).
[0202] 5. Loss of muscle mass (atrophy).
[0203] 6. Muscle contractures in the heels, legs.
[0204] 7. Muscle deformities.
[0205] 8. Respiratory disorders, including pneumonia and swallowing with food or fluid passing into the lungs (in late stages of the disease).

[0206] Duchenne muscular dystrophy (DMD) is caused by a mutation of the dystrophin gene at locus Xp21, located on the short arm of the X chromosome. Dystrophin is responsible for connecting the cytoskeleton of each muscle fiber to the underlying basal lamina (extracellular matrix), through a protein complex containing many subunits. The absence of dystrophin permits excess calcium to penetrate the sarcolemma (the cell membrane). Alterations in calcium and signaling pathways cause water to enter into the mitochondria, which then burst.

[0207] In skeletal muscle dystrophy, mitochondrial dysfunction gives rise to an amplification of stress-induced cytosolic calcium signals and an amplification of stress-induced reactive-oxygen species (ROS) production. In a complex cascading process that involves several pathways and is not clearly understood, increased oxidative stress within the cell damages the sarcolemma and eventually results in the death of the cell. Muscle fibers undergo necrosis and are ultimately replaced with adipose and connective tissue.

[0208] DMD is inherited in an X-linked recessive pattern. Females will typically be carriers for the disease while males will be affected. Typically, a female carrier will be unaware they carry a mutation until they have an affected son. The son of a carrier mother has a 50% chance of inheriting the defective gene from his mother. The daughter of a carrier mother has a 50% chance of being a carrier and a 50% chance of having two normal copies of the gene. In all cases, an unaffected father will either pass a normal Y to his son or a normal X to his daughter. Female carriers of an X-linked recessive condition, such as DMD, can show symptoms depending on their pattern of X-inactivation.

[0209] Exon deletions preceding exon 51 of the human DMD gene, which disrupt the open reading frame (ORF) by juxtaposing out of frame exons, represent the most common type of human DMD mutation. Skipping of exon 51 can, in principle, restore the DMD ORF in 13% of DMD patients with exon deletions.

[0210] Duchenne muscular dystrophy has an incidence of 1 in 5000 male infants. Mutations within the dystrophin gene can either be inherited or occur spontaneously during germline transmission.

### Sequences

[0211] The following tables provide exemplary primer, gRNA and genomic targeting sequences for use in connection with the compositions and methods disclosed herein.

TABLE 4
Sequence of Primers for DMD iPSCs
PCR/T7E1 and RT-PCR primers

| | | SEQ | | SEQ |
|---|---|---|---|---|
| DMD | | ID | | ID |
| # | PCR/T7E1 | NO: | RT-PCR | NO: |
| Del. | F: TTCCCTGGCAAG | 2463 | F: CCCAGAAGAGC | 2469 |
| | GTCTGA | | AAGATAAACTTGAA | |
| | R: ATCCTCAAGGTC | 2464 | R: CTCTGTTCCAA | 2470 |
| | ACCCACC | | ATCCTGCATTGT | |
| pEx. | F: CACACCTGTTAT | 2465 | F: CATAAGCCCAG | 2471 |
| | ATTTTTCCGTGAAG | | AAGAGCAAGATAAA | |
| | R: CAAAGGAGAAGC | 2466 | R: ATAGGAGATAA | 2472 |
| | AAAAACACATTCTA | | CCACAGCAGCAGAT | |
| Dup. | F: GTAATGTATAAC | 2467 | E59F: GGGAAAAA | 2473 |
| | TGTATAACGTGGGGC | | TTGAACCTGCAC | |
| | ACTC | | | |
| | R: GGTGAGTTGTT | 2468 | E55R: CATCAGCT | 2474 |
| | GCTACAGCTCTTCC | | CTTTTACTCCCTT | |
| | | | E53F: GGAGGGTC | 2475 |
| | | | CCTATACAGTAG | |

TABLE 5
Genomic targeting sequences of top 12 exons.

| | Applica- | | SEQ | | SEQ |
|---|---|---|---|---|---|
| | bility | gRNA/PAM at | ID | gRNA/PAM at | ID |
| Exon | (30) | acceptor site | NO. | donor site | NO. |
| 51 | 13.0% | #1: | 2378 | | |
| | | TGCAAAAACCCAA | | | |
| | | AATATTTTAG | | | |
| | | #2: | 2379 | | |
| | | AAAATATTTTAGC | | | |
| | | TCCTACTCAG | | | |
| | | #3: | 2380 | | |
| | | CAGAGTAACAGTC | | | |
| | | TGAGTAGGAG* | | | |
| 45 | 8.1% | #1: | 2381 | | |
| | | TTGCCTTTTTGGT | | | |
| | | ATCTTACAGG | | | |
| | | #2: | 2382 | | |
| | | TTTGCCTTTTTGG | | | |
| | | TATCTTACAG | | | |
| | | #3: | 2383 | | |
| | | CGCTGCCCAATGC | | | |
| | | CATCCTGGAG | | | |
| 53 | 7.7% | #1: | 2384 | #4: | 2414 |
| | | ATTTATTTTTCCT | | AAAGAAAATCAC | |
| | | TTATTCTAG | | AGAAACCAAGG | |
| | | #2: | 2385 | #5: | 2415 |
| | | TTTCCTTTTATTC | | AAAATCACAGAA | |
| | | TAGTTGAAAG | | ACCAAGGTTAG | |
| | | #3: | 2386 | #6: | 2416 |
| | | TGATTCTGAATTC | | GGTATCTTTGAT | |
| | | TTTCAACTAG | | ACTAACCTTGG | |
| 44 | 6.2% | #1: | 2387 | #4: | 2417 |
| | | ATCCATATGCTTT | | GTAATACAAATG | |
| | | TACCTGCAGG | | GTATCTTAAGG | |
| | | #2: | 2388 | | |
| | | GATCCATATGCTT | | | |
| | | TTACCTGCAG | | | |
| | | 3: | 2389 | | |
| | | CAGATCTGTCAAA | | | |
| | | TCGCCTGCAG | | | |
| 46 | 4.3% | #1: | 2390 | | |
| | | TTATTCTTCTTTC | | | |
| | | TCCAGGCTAG | | | |
| | | #2: | 2391 | | |
| | | AATTTTATTCTTC | | | |
| | | TTTCTCCAGG | | | |
| | | #3: | 2392 | | |
| | | CAATTTTATTCTT | | | |
| | | CTTTCTCCAG | | | |
| 52 | 4.1% | #1: | 2393 | | |
| | | TAAGGGATATTTG | | | |
| | | TTCTTACAGG | | | |
| | | #2: | 2394 | | |
| | | CTAAGGGATATTT | | | |
| | | GTTCTTACAG | | | |
| | | #3: | 2395 | | |
| | | TGTTCTTACAGGC | | | |
| | | AACAATGCAG | | | |
| 50 | 4.0% | #1: | 2396 | | |
| | | TGTATGCTTTTCT | | | |
| | | GTTAAAGAGG | | | |
| | | #2: | 2397 | | |
| | | ATGTGTATGCTTT | | | |
| | | TCTGTTAAAG | | | |
| | | #3: | 2398 | | |
| | | GTGTATGCTTTTC | | | |
| | | TGTTAAAGAG | | | |
| 43 | 3.8% | #1: | 2399 | #4: | 2418 |
| | | GTTTTAAAATTTT | | TATGTGTTACCT | |
| | | TATATTACAG | | ACCCTTGTCGG | |
| | | #2: | 2400 | #5: | 2419 |
| | | TTTTATATTACAG | | AAATGTACAAGG | |
| | | AATATAAAAG | | ACCGACAAGGG | |
| | | #3: | 2401 | #6: | 2420 |
| | | ATATTACAGAATA | | GTACAAGGACCG | |
| | | TAAAAGATAG | | ACAAGGGTAGG | |
| 6 | 3.0%† | #1: | 2402 | #4: | 2421 |
| | | TGAAAATTTATTT | | ATGCTCTCATCC | |
| | | CCACATGTAG | | ATAGTCATAGG | |
| | | #2: | 2403 | #5: | 2422 |
| | | GAAAATTTATTTC | | TCTCATCCATAG | |
| | | CACATGTAGG | | TCATAGGTAAG | |
| | | #3: | 2404 | #6: | 2423 |
| | | TTACATTTTTGAC | | CATCCATAGTCA | |
| | | CTACATGTGG | | TAGGTAAGAAG | |
| 7 | 3.0%† | #1: | 2405 | | |
| | | TGTGTATGTGTAT | | | |
| | | GTGTTTTAGG | | | |
| | | #2: | 2406 | | |
| | | TATGTGTATGTGT | | | |
| | | TTTAGGCCAG | | | |
| | | #3: | 2407 | | |
| | | CTATTCCAGTCAA | | | |
| | | ATAGGTCTGG | | | |
| 8 | 2.3% | #1: | 2408 | #4: | 2424 |
| | | GTGTAGTGTTAAT | | TGCACTATTCTC | |
| | | GTGCTTACAG | | AACAGGTAAAG | |
| | | #2: | 2409 | #5: | 2425 |
| | | GGACTTCTTATCT | | TCAAATGCACTA | |
| | | GGATAGGTGG | | TTCTCAACAGG | |
| | | #3: | 2410 | #6: | 2426 |
| | | TAGGTGGTATCAA | | CTTTACACACTT | |
| | | CATCTGTAAG | | TACCTGTTGAG | |
| 55 | 2.09% | #1: | 2411 | | |
| | | TGAACATTTGGTC | | | |
| | | CTTTGCAGGG | | | |
| | | #2: | 2412 | | |
| | | TCTGAACATTTGG | | | |
| | | TCCTTTGCAG | | | |
| | | #3: | 2413 | | |
| | | TCTCGCTCACTCA | | | |
| | | CCCTGCAAAG | | | |

†Dual exon skipping (exons 6 and 7).

TABLE 6
Genomic Target Sequences

| Targeted | Guide | | Genomic | | SEQ |
|---|---|---|---|---|---|
| gRNA Exon | # | Strand | Target Sequence* | PAM | ID NO. |
| Human-Exon 51 | 4 | 1 | tctttttcttcttttttccttttt | tttt | 60 |
| Human-Exon 51 | 5 | 1 | ctttttcttcttttttcctttttG | tttt | 61 |
| Human-Exon 51 | 6 | 1 | tttttcttcttttttcctttttGC | tttc | 62 |
| Human-Exon 51 | 7 | 1 | tcttcttttttcctttttGCAAAA | tttt | 63 |
| Human-Exon 51 | 8 | 1 | cttcttttttcctttttGCAAAAA | tttt | 64 |
| Human-Exon 51 | 9 | 1 | ttcttttttcctttttGCAAAAAC | tttc | 65 |
| Human-Exon 51 | 10 | 1 | ttcctttttGCAAAAACCCAAAAT | tttt | 66 |
| Human-Exon 51 | 11 | 1 | tcctttttGCAAAAACCCAAAATA | tttt | 67 |
| Human-Exon 51 | 12 | 1 | cctttttGCAAAAACCCAAAATAT | tttt | 68 |
| Human-Exon 51 | 13 | 1 | ctttttGCAAAAACCCAAAATATT | tttc | 69 |
| Human-Exon 51 | 14 | 1 | tGCAAAAACCCAAAATATTTTAGC | tttt | 70 |
| Human-Exon 51 | 15 | 1 | GCAAAAACCCAAAATATTTTAGCT | tttt | 71 |
| Human-Exon 51 | 16 | 1 | CAAAAACCCAAAATATTTTAGCTC | tttG | 72 |
| Human-Exon 51 | 17 | 1 | AGCTCCTACTCAGACTGTTACTCT | TTTT | 73 |
| Human-Exon 51 | 18 | 1 | GCTCCTACTCAGACTGTTACTCTG | TTTA | 74 |
| Human-Exon 51 | 19 | -1 | CTTAGTAACCACAGGTTGTGTCAC | TTTC | 75 |
| Human-Exon 51 | 20 | -1 | GAGATGGCAGTTTCCTTAGTAACC | TTTG | 76 |
| Human-Exon 51 | 21 | -1 | TAGTTTGGAGATGGCAGTTTCCTT | TTTC | 77 |
| Human-Exon 51 | 22 | -1 | TTCTCATACCTTCTGCTTGATGAT | TTTT | 78 |
| Human-Exon 51 | 23 | -1 | TCATTTTTTCTCATACCTTCTGCT | TTTA | 79 |
| Human-Exon 51 | 24 | -1 | ATCATTTTTTCTCATACCTTCTGC | TTTT | 80 |
| Human-Exon 51 | 25 | -1 | AAGAAAAACTTCTGCCAACTTTTA | TTTA | 81 |
| Human-Exon 51 | 26 | -1 | AAAGAAAAACTTCTGCCAACTTTT | TTTT | 82 |
| Human-Exon 51 | 27 | 1 | TCTTTAAAATGAAGATTTTCCACC | TTTT | 83 |
| Human-Exon 51 | 28 | 1 | CTTTAAAATGAAGATTTTCCACCA | TTTT | 84 |
| Human-Exon 51 | 29 | 1 | TTTAAAATGAAGATTTTCCACCAA | TTTC | 85 |
| Human-Exon 51 | 30 | 1 | AAATGAAGATTTTCCACCAATCAC | TTTA | 86 |
| Human-Exon 51 | 31 | 1 | CCACCAATCACTTTACTCTCCTAG | TTTT | 87 |
| Human-Exon 51 | 32 | 1 | CACCAATCACTTTACTCTCCTAGA | TTTC | 88 |
| Human-Exon 51 | 33 | 1 | CTCTCCTAGACCATTTCCCACCAG | TTTA | 89 |
| Human-Exon 45 | 1 | -1 | agaaaagattaaacagtgtgctac | tttg | 90 |
| Human-Exon 45 | 2 | -1 | tttgagaaaagattaaacagtgtg | TTTa | 91 |
| Human-Exon 45 | 3 | -1 | atttgagaaaagattaaacagtgt | TTTT | 92 |
| Human-Exon 45 | 4 | -1 | Tatttgagaaaagattaaacagtg | TTTT | 93 |
| Human-Exon 45 | 5 | 1 | atcttttctcaaatAAAAAGACAT | ttta | 94 |
| Human-Exon 45 | 6 | 1 | ctcaaatAAAAAGACATGGGGCTT | tttt | 95 |
| Human-Exon 45 | 7 | 1 | tcaaatAAAAAGACATGGGGCTTC | tttc | 96 |
| Human-Exon 45 | 8 | 1 | TGTTTTGCCTTTTTGGTATCTTAC | TTTT | 97 |
| Human-Exon 45 | 9 | 1 | GTTTTGCCTTTTTGGTATCTTACA | TTTT | 98 |
| Human-Exon 45 | 10 | 1 | TTTTGCCTTTTTGGTATCTTACAG | TTTG | 99 |
| Human-Exon 45 | 11 | 1 | GCCTTTTTGGTATCTTACAGGAAC | TTTT | 100 |
| Human-Exon 45 | 12 | 1 | CCTTTTTGGTATCTTACAGGAACT | TTTG | 101 |
| Human-Exon 45 | 13 | 1 | TGGTATCTTACAGGAACTCCAGGA | TTTT | 102 |
| Human-Exon 45 | 14 | 1 | GGTATCTTACAGGAACTCCAGGAT | TTTT | 103 |
| Human-Exon 45 | 15 | -1 | AGGATTGCTGAATTATTTCTTCCC | TTTG | 104 |
| Human-Exon 45 | 16 | -1 | GAGGATTGCTGAATTATTTCTTCC | TTTT | 105 |
| Human-Exon 45 | 17 | -1 | TGAGGATTGCTGAATTATTTCTTC | TTTT | 106 |
| Human-Exon 45 | 18 | -1 | CTGTAGAATACTGGCATCTGTTTT | TTTC | 107 |
| Human-Exon 45 | 19 | -1 | CCTGTAGAATACTGGCATCTGTTT | TTTT | 108 |
| Human-Exon 45 | 20 | -1 | TCCTGTAGAATACTGGCATCTGTT | TTTT | 109 |
| Human-Exon 45 | 21 | -1 | CAGACCTCCTGCCACCGCAGATTC | TTTG | 110 |
| Human-Exon 45 | 22 | -1 | TGTCTGACAGCTGTTTGCAGACCT | TTTC | 111 |
| Human-Exon 45 | 23 | -1 | CTGTCTGACAGCTGTTTGCAGACC | TTTT | 112 |
| Human-Exon 45 | 24 | -1 | TCTGTCTGACAGCTGTTTGCAGAC | TTTT | 113 |
| Human-Exon 45 | 25 | -1 | TTCTGTCTGACAGCTGTTTGCAGA | TTTT | 114 |
| Human-Exon 45 | 26 | -1 | ATTCCTATTAGATCTGTCGCCCTA | TTTC | 115 |
| Human-Exon 45 | 27 | -1 | CATTCCTATTAGATCTGTCGCCCT | TTTT | 116 |
| Human-Exon 45 | 28 | 1 | AGCAGACTTTTTAAGCTTTCTTTA | TTTT | 117 |
| Human-Exon 45 | 29 | 1 | GCAGACTTTTTAAGCTTTCTTTAG | TTTA | 118 |
| Human-Exon 45 | 30 | 1 | TAAGCTTTCTTTAGAAGAATATTT | TTTT | 119 |
| Human-Exon 45 | 31 | 1 | AAGCTTTCTTTAGAAGAATATTTC | TTTT | 120 |
| Human-Exon 45 | 32 | 1 | AGCTTTCTTTAGAAGAATATTTCA | TTTA | 121 |
| Human-Exon 45 | 33 | 1 | TTTAGAAGAATATTTCATGAGAGA | TTTC | 122 |
| Human-Exon 45 | 34 | 1 | GAAGAATATTTCATGAGAGATTAT | TTTA | 123 |
| Human-Exon 44 | 1 | 1 | TCAGTATAACCAAAAAATATACGC | TTTG | 124 |
| Human-Exon 44 | 2 | 1 | acataatccatctatttttcttga | tttt | 125 |
| Human-Exon 44 | 3 | 1 | cataatccatctatttttcttgat | ttta | 126 |
| Human-Exon 44 | 4 | 1 | tcttgatccatatgcttttACCTG | tttt | 127 |
| Human-Exon 44 | 5 | 1 | cttgatccatatgcttttACCTGC | tttt | 128 |
| Human-Exon 44 | 6 | 1 | ttgatccatatgcttttACCTGCA | tttc | 129 |
| Human-Exon 44 | 7 | -1 | TCAACAGATCTGTCAAATCGCCTG | TTTC | 130 |
| Human-Exon 44 | 8 | 1 | ACCTGCAGGCGATTTGACAGATCT | tttt | 131 |
| Human-Exon 44 | 9 | 1 | CCTGCAGGCGATTTGACAGATCTG | tttA | 132 |
| Human-Exon 44 | 10 | 1 | ACAGATCTGTTGAGAAATGGCGGC | TTTG | 133 |
| Human-Exon 44 | 11 | -1 | TATCATAATGAAAACGCCGCCATT | TTTA | 134 |
| Human-Exon 44 | 12 | 1 | CATTATGATATAAAGATATTTAAT | TTTT | 135 |
| Human-Exon 44 | 13 | -1 | TATTTAGCATGTTCCCAATTCTCA | TTTG | 136 |
| Human-Exon 44 | 14 | -1 | GAAAAAACAAATCAAAGACTTACC | TTTC | 137 |
| Human-Exon 44 | 15 | 1 | ATTTGTTTTTTCGAAATTGTATTT | TTTG | 138 |
| Human-Exon 44 | 16 | 1 | TTTTTTCGAAATTGTATTTATCTT | TTTG | 139 |
| Human-Exon 44 | 17 | 1 | TTCGAAATTGTATTTATCTTCAGC | TTTT | 140 |
| Human-Exon 44 | 18 | 1 | TCGAAATTGTATTTATCTTCAGCA | TTTT | 141 |
| Human-Exon 44 | 19 | 1 | CGAAATTGTATTTATCTTCAGCAC | TTTT | 142 |
| Human-Exon 44 | 20 | 1 | GAAATTGTATTTATCTTCAGCACA | TTTC | 143 |
| Human-Exon 44 | 21 | -1 | AGAAGTTAAAGAGTCCAGATGTGC | TTTA | 144 |
| Human-Exon 44 | 22 | 1 | TCTTCAGCACATCTGGACTCTTTA | TTTA | 145 |
| Human-Exon 44 | 23 | -1 | CATCACCCTTCAGAACCTGATCTT | TTTC | 146 |
| Human-Exon 44 | 24 | 1 | ACTTCTTAAAGATCAGGTTCTGAA | TTTA | 147 |
| Human-Exon 44 | 25 | 1 | GACTGTTGTTGTCATCATTATATT | TTTT | 148 |
| Human-Exon 44 | 26 | 1 | ACTGTTGTTGTCATCATTATATTA | TTTG | 149 |
| Human-Exon 53 | 1 | -1 | AACTAGAATAAAAGGAAAAATAAA | TTTC | 150 |
| Human-Exon 53 | 2 | 1 | CTACTATATATTTATTTTTCCTTT | TTTA | 151 |
| Human-Exon 53 | 3 | 1 | TTTTTCCTTTTATTCTAGTTGAAA | TTTA | 152 |
| Human-Exon 53 | 4 | 1 | TCCTTTTATTCTAGTTGAAAGAAT | TTTT | 153 |
| Human-Exon 53 | 5 | 1 | CCTTTTATTCTAGTTGAAAGAATT | TTTT | 154 |
| Human-Exon 53 | 6 | 1 | CTTTTATTCTAGTTGAAAGAATTC | TTTC | 155 |
| Human-Exon 53 | 7 | 1 | ATTCTAGTTGAAAGAATTCAGAAT | TTTT | 156 |
| Human-Exon 53 | 8 | 1 | TTCTAGTTGAAAGAATTCAGAATC | TTTA | 157 |
| Human-Exon 53 | 9 | -1 | ATTCAACTGTTGCCTCCGGTTCTG | TTTC | 158 |
| Human-Exon 53 | 10 | -1 | ACATTTCATTCAACTGTTGCCTCC | TTTA | 159 |
| Human-Exon 53 | 11 | -1 | CTTTTGGATTGCATCTACTGTATA | TTTT | 160 |
| Human-Exon 53 | 12 | -1 | TGTGATTTTCTTTTGGATTGCATC | TTTC | 161 |
| Human-Exon 53 | 13 | -1 | ATACTAACCTTGGTTTCTGTGATT | TTTG | 162 |
| Human-Exon 53 | 14 | -1 | AAAAGGTATCTTTGATACTAACCT | TTTA | 163 |
| Human-Exon 53 | 15 | -1 | AAAAAGGTATCTTTGATACTAACC | TTTT | 164 |
| Human-Exon 53 | 16 | -1 | TTTTAAAAAGGTATCTTTGATACT | TTTA | 165 |
| Human-Exon 53 | 17 | -1 | ATTTTAAAAAGGTATCTTTGATAC | TTTT | 166 |
| Human-Exon 46 | 1 | -1 | TTAATGCAAACTGGGACACAAACA | TTTG | 167 |
| Human-Exon 46 | 2 | 1 | TAAATTGCCATGTTTGTGTCCCAG | TTTT | 168 |
| Human-Exon 46 | 3 | 1 | AAATTGCCATGTTTGTGTCCCAGT | TTTT | 169 |
| Human-Exon 46 | 4 | 1 | AATTGCCATGTTTGTGTCCCAGTT | TTTA | 170 |
| Human-Exon 46 | 5 | 1 | TGTCCCAGTTTGCATTAACAAATA | TTTG | 171 |
| Human-Exon 46 | 6 | -1 | CAACATAGTTCTCAAACTATTTGT | tttC | 172 |
| Human-Exon 46 | 7 | -1 | CCAACATAGTTCTCAAACTATTTG | tttt | 173 |
| Human-Exon 46 | 8 | -1 | tCCAACATAGTTCTCAAACTATTT | tttt | 174 |
| Human-Exon 46 | 9 | -1 | tttCCAACATAGTTCTCAAACTAT | tttt | 175 |
| Human-Exon 46 | 10 | -1 | ttttCCAACATAGTTCTCAAACTA | tttt | 176 |
| Human-Exon 46 | 11 | -1 | tttttCCAACATAGTTCTCAAACT | tttt | 177 |
| Human-Exon 46 | 12 | 1 | CATTAACAAATAGTTTGAGAACTA | TTTG | 178 |
| Human-Exon 46 | 13 | 1 | AGAACTATGTTGGaaaaaaaaaTA | TTTG | 179 |
| Human-Exon 46 | 14 | -1 | GTTCTTCTAGCCTGGAGAAAGAAG | TTTT | 180 |
| Human-Exon 46 | 15 | 1 | ATTCTTCTTTCTCCAGGCTAGAAG | TTTT | 181 |
| Human-Exon 46 | 16 | 1 | TTCTTCTTTCTCCAGGCTAGAAGA | TTTA | 182 |
| Human-Exon 46 | 17 | 1 | TCCAGGCTAGAAGAACAAAAGAAT | TTTC | 183 |
| Human-Exon 46 | 18 | -1 | AAATTCTGACAAGATATTCTTTTG | TTTG | 184 |
| Human-Exon 46 | 19 | -1 | CTTTTAGTTGCTGCTCTTTTCCAG | TTTT | 185 |
| Human-Exon 46 | 20 | -1 | AGAAAATAAAATTACCTTGACTTG | TTTG | 186 |
| Human-Exon 46 | 21 | -1 | TGCAAGCAGGCCCTGGGGGATTTG | TTTA | 187 |
| Human-Exon 46 | 22 | 1 | ATTTTCTCAAATCCCCCAGGGCCT | TTTT | 188 |
| Human-Exon 46 | 23 | 1 | TTTTCTCAAATCCCCCAGGGCCTG | TTTA | 189 |
| Human-Exon 46 | 24 | 1 | CTCAAATCCCCCAGGGCCTGCTTG | TTTT | 190 |
| Human-Exon 46 | 25 | 1 | TCAAATCCCCCAGGGCCTGCTTGC | TTTC | 191 |
| Human-Exon 46 | 26 | 1 | TTAATTCAATCATTGGTTTTCTGC | TTTT | 192 |
| Human-Exon 46 | 27 | 1 | TAATTCAATCATTGGTTTTCTGCC | TTTT | 193 |
| Human-Exon 46 | 28 | 1 | AATTCAATCATTGGTTTTCTGCCC | TTTT | 194 |
| Human-Exon 46 | 29 | 1 | ATTCAATCATTGGTTTTCTGCCCA | TTTA | 195 |
| Human-Exon 46 | 30 | -1 | GCAAGGAACTATGAATAACCTAAT | TTTA | 196 |
| Human-Exon 46 | 31 | 1 | CTGCCCATTAGGTTATTCATAGTT | TTTT | 197 |
| Human-Exon 46 | 32 | 1 | TGCCCATTAGGTTATTCATAGTTC | TTTC | 198 |
| Human-Exon 52 | 1 | -1 | TAGAAAACAATTTAACAGGAAATA | TTTA | 199 |
| Human-Exon 52 | 2 | 1 | CTGTTAAATTGTTTTCTATAAACC | TTTC | 200 |
| Human-Exon 52 | 3 | -1 | GAAATAAAAAAGATGTTACTGTAT | TTTA | 201 |
| Human-Exon 52 | 4 | -1 | AGAAATAAAAAAGATGTTACTGTA | TTTT | 202 |
| Human-Exon 52 | 5 | 1 | CTATAAACCCTTATACAGTAACAT | TTTT | 203 |
| Human-Exon 52 | 6 | 1 | TATAAACCCTTATACAGTAACATC | TTTC | 204 |
| Human-Exon 52 | 7 | 1 | TTATTTCTAAAAGTGTTTTGGCTG | TTTT | 205 |
| Human-Exon 52 | 8 | 1 | TATTTCTAAAAGTGTTTTGGCTGG | TTTT | 206 |
| Human-Exon 52 | 9 | 1 | ATTTCTAAAAGTGTTTTGGCTGGT | TTTT | 207 |
| Human-Exon 52 | 10 | 1 | TTTCTAAAAGTGTTTTGGCTGGTC | TTTA | 208 |
| Human-Exon 52 | 11 | 1 | TAAAAGTGTTTTGGCTGGTCTCAC | TTTC | 209 |
| Human-Exon 52 | 12 | -1 | CATAATACAAAGTAAAGTACAATT | TTTA | 210 |
| Human-Exon 52 | 13 | -1 | ACATAATACAAAGTAAAGTACAAT | TTTT | 211 |
| Human-Exon 52 | 14 | 1 | GGCTGGTCTCACAATTGTACTTTA | TTTT | 212 |
| Human-Exon 52 | 15 | 1 | GCTGGTCTCACAATTGTACTTTAC | TTTG | 213 |
| Human-Exon 52 | 16 | 1 | CTTTGTATTATGTAAAAGGAATAC | TTTA | 214 |
| Human-Exon 52 | 17 | 1 | TATTATGTAAAAGGAATACACAAC | TTTG | 215 |
| Human-Exon 52 | 18 | 1 | TTCTTACAGGCAACAATGCAGGAT | TTTG | 216 |
| Human-Exon 52 | 19 | 1 | GAACAGAGGCGTCCCCAGTTGGAA | TTTG | 217 |
| Human-Exon 52 | 20 | -1 | GGCAGCGGTAATGAGTTCTTCCAA | TTTG | 218 |
| Human-Exon 52 | 21 | -1 | TCAAATTTTGGGCAGCGGTAATGA | TTTT | 219 |
| Human-Exon 52 | 22 | 1 | AAAAACAAGACCAGCAATCAAGAG | TTTG | 220 |
| Human-Exon 52 | 23 | -1 | TGTGTCCCATGCTTGTTAAAAAAC | TTTG | 221 |
| Human-Exon 52 | 24 | 1 | TTAACAAGCATGGGACACACAAAG | TTTT | 222 |
| Human-Exon 52 | 25 | 1 | TAACAAGCATGGGACACACAAAGC | TTTT | 223 |
| Human-Exon 52 | 26 | 1 | AACAAGCATGGGACACACAAAGCA | TTTT | 224 |
| Human-Exon 52 | 27 | 1 | ACAAGCATGGGACACACAAAGCAA | TTTA | 225 |
| Human-Exon 52 | 28 | -1 | TTGAAACTTGTCATGCATCTTGCT | TTTA | 226 |
| Human-Exon 52 | 29 | -1 | ATTGAAACTTGTCATGCATCTTGC | TTTT | 227 |
| Human-Exon 52 | 30 | -1 | TATTGAAACTTGTCATGCATCTTG | TTTT | 228 |
| Human-Exon 52 | 31 | 1 | AATAAAAACTTAAGTTCATATATC | TTTC | 229 |
| Human-Exon 50 | 1 | -1 | GTGAATATATTATTGGATTTCTAT | TTTG | 230 |
| Human-Exon 50 | 2 | -1 | AAGATAATTCATGAACATCTTAAT | TTTG | 231 |
| Human-Exon 50 | 3 | -1 | ACAGAAAAGCATACACATTACTTA | TTTA | 232 |
| Human-Exon 50 | 4 | 1 | CTGTTAAAGAGGAAGTTAGAAGAT | TTTT | 233 |
| Human-Exon 50 | 5 | 1 | TGTTAAAGAGGAAGTTAGAAGATC | TTTC | 234 |
| Human-Exon 50 | 6 | -1 | CCGCCTTCCACTCAGAGCTCAGAT | TTTA | 235 |
| Human-Exon 50 | 7 | -1 | CCCTCAGCTCTTGAAGTAAACGGT | TTTG | 236 |
| Human-Exon 50 | 8 | 1 | CTTCAAGAGCTGAGGGCAAAGCAG | TTTA | 237 |
| Human-Exon 50 | 9 | -1 | AACAAATAGCTAGAGCCAAAGAGA | TTTG | 238 |
| Human-Exon 50 | 10 | -1 | GAACAAATAGCTAGAGCCAAAGAG | TTTT | 239 |
| Human-Exon 50 | 11 | 1 | GCTCTAGCTATTTGTTCAAAAGTG | TTTG | 240 |
| Human-Exon 50 | 12 | 1 | TTCAAAAGTGCAACTATGAAGTGA | TTTG | 241 |
| Human-Exon 50 | 13 | -1 | TCTCTCACCCAGTCATCACTTCAT | TTTC | 242 |
| Human-Exon 50 | 14 | -1 | CTCTCTCACCCAGTCATCACTTCA | TTTT | 243 |
| Human-Exon 43 | 1 | 1 | tatatatatatatatTTTTCTCTT | TTTG | 244 |
| Human-Exon 43 | 2 | 1 | TCTCTTTCTATAGACAGCTAATTC | tTTT | 245 |
| Human-Exon 43 | 3 | 1 | CTCTTTCTATAGACAGCTAATTCA | TTTT | 246 |
| Human-Exon 43 | 4 | -1 | AAACAGTAAAAAAATGAATTAGCT | TTTA | 247 |
| Human-Exon 43 | 5 | 1 | TCTTTCTATAGACAGCTAATTCAT | TTTC | 248 |
| Human-Exon 43 | 6 | -1 | AAAACAGTAAAAAAATGAATTAGC | TTTT | 249 |
| Human-Exon 43 | 7 | 1 | TATAGACAGCTAATTCATTTTTTT | TTTC | 250 |
| Human-Exon 43 | 8 | -1 | TATTCTGTAATATAAAAATTTTAA | TTTA | 251 |
| Human-Exon 43 | 9 | -1 | ATATTCTGTAATATAAAAATTTTA | TTTT | 252 |
| Human-Exon 43 | 10 | 1 | TTTACTGTTTTAAAATTTTTATAT | TTTT | 253 |
| Human-Exon 43 | 11 | 1 | TTACTGTTTTAAAATTTTTATATT | TTTT | 254 |
| Human-Exon 43 | 12 | 1 | TACTGTTTTAAAATTTTTATATTA | TTTT | 255 |
| Human-Exon 43 | 13 | 1 | ACTGTTTTAAAATTTTTATATTAC | TTTT | 256 |
| Human-Exon 43 | 14 | 1 | CTGTTTTAAAATTTTTATATTACA | TTTA | 257 |
| Human-Exon 43 | 15 | 1 | AAAATTTTTATATTACAGAATATA | TTTT | 258 |
| Human-Exon 43 | 16 | 1 | AAATTTTTATATTACAGAATATAA | TTTA | 259 |
| Human-Exon 43 | 17 | -1 | TTGTAGACTATCTTTTATATTCTG | TTTG | 260 |
| Human-Exon 43 | 18 | 1 | TATATTACAGAATATAAAAGATAG | TTTT | 261 |
| Human-Exon 43 | 19 | 1 | ATATTACAGAATATAAAAGATAGT | TTTT | 262 |
| Human-Exon 43 | 20 | 1 | TATTACAGAATATAAAAGATAGTC | TTTA | 263 |
| Human-Exon 43 | 21 | -1 | CAATGCTGCTGTCTTCTTGCTATG | TTTG | 264 |
| Human-Exon 43 | 22 | 1 | CAATGGGAAAAAGTTAACAAAATG | TTTC | 265 |
| Human-Exon 43 | 23 | -1 | TGCAAGTATCAAGAAAAATATATG | TTTC | 266 |
| Human-Exon 43 | 24 | 1 | TCTTGATACTTGCAGAAATGATTT | TTTT | 267 |
| Human-Exon 43 | 25 | 1 | CTTGATACTTGCAGAAATGATTTG | TTTT | 268 |
| Human-Exon 43 | 26 | 1 | TTGATACTTGCAGAAATGATTTGT | TTTC | 269 |
| Human-Exon 43 | 27 | 1 | TTTTCAGGGAACTGTAGAATTTAT | TTTG | 270 |
| Human-Exon 43 | 28 | -1 | CATGGAGGGTACTGAAATAAATTC | TTTC | 271 |
| Human-Exon 43 | 29 | -1 | CCATGGAGGGTACTGAAATAAATT | TTTT | 272 |
| Human-Exon 43 | 30 | 1 | CAGGGAACTGTAGAATTTATTTCA | TTTT | 273 |
| Human-Exon 43 | 31 | -1 | TCCATGGAGGGTACTGAAATAAAT | TTTT | 274 |
| Human-Exon 43 | 32 | 1 | AGGGAACTGTAGAATTTATTTCAG | TTTC | 275 |
| Human-Exon 43 | 33 | -1 | TTCCATGGAGGGTACTGAAATAAA | TTTT | 276 |
| Human-Exon 43 | 34 | -1 | CCTGTCTTTTTTCCATGGAGGGTA | TTTC | 277 |
| Human-Exon 43 | 35 | -1 | CCCTGTCTTTTTTCCATGGAGGGT | TTTT | 278 |
| Human-Exon 43 | 36 | -1 | TCCCTGTCTTTTTTCCATGGAGGG | TTTT | 279 |
| Human-Exon 43 | 37 | 1 | TTTCAGTACCCTCCATGGAAAAAA | TTTA | 280 |
| Human-Exon 43 | 38 | 1 | AGTACCCTCCATGGAAAAAAGACA | TTTC | 281 |
| Human-Exon 6 | 1 | 1 | AGTTTGCATGGTTCTTGCTCAAGG | TTTA | 282 |
| Human-Exon 6 | 2 | -1 | ATAAGAAAATGCATTCCTTGAGCA | TTTC | 283 |
| Human-Exon 6 | 3 | -1 | CATAAGAAAATGCATTCCTTGAGC | TTTT | 284 |
| Human-Exon 6 | 4 | 1 | CATGGTTCTTGCTCAAGGAATGCA | TTTG | 285 |
| Human-Exon 6 | 5 | -1 | ACCTACATGTGGAAATAAATTTTC | TTTG | 286 |
| Human-Exon 6 | 6 | -1 | GACCTACATGTGGAAATAAATTTT | TTTT | 287 |
| Human-Exon 6 | 7 | -1 | TGACCTACATGTGGAAATAAATTT | TTTT | 288 |
| Human-Exon 6 | 8 | 1 | CTTATGAAAATTTATTTCCACATG | TTTT | 289 |
| Human-Exon 6 | 9 | 1 | TTATGAAAATTTATTTCCACATGT | TTTC | 290 |
| Human-Exon 6 | 10 | -1 | ATTACATTTTTGACCTACATGTGG | TTTC | 291 |
| Human-Exon 6 | 11 | -1 | CATTACATTTTTGACCTACATGTG | TTTT | 292 |
| Human-Exon 6 | 12 | -1 | TCATTACATTTTTGACCTACATGT | TTTT | 293 |
| Human-Exon 6 | 13 | 1 | TTTCCACATGTAGGTCAAAAATGT | TTTA | 294 |
| Human-Exon 6 | 14 | 1 | CACATGTAGGTCAAAAATGTAATG | TTTC | 295 |
| Human-Exon 6 | 15 | -1 | TTGCAATCCAGCCATGATATTTTT | TTTG | 296 |
| Human-Exon 6 | 16 | -1 | ACTGTTGGTTTGTTGCAATCCAGC | TTTC | 297 |
| Human-Exon 6 | 17 | -1 | CACTGTTGGTTTGTTGCAATCCAG | TTTT | 298 |
| Human-Exon 6 | 18 | 1 | AATGCTCTCATCCATAGTCATAGG | TTTG | 299 |
| Human-Exon 6 | 19 | -1 | ATGTCTCAGTAATCTTCTTACCTA | TTTA | 300 |
| Human-Exon 6 | 20 | -1 | CAAGTTATTTAATGTCTCAGTAAT | TTTA | 301 |
| Human-Exon 6 | 21 | -1 | ACAAGTTATTTAATGTCTCAGTAA | TTTT | 302 |
| Human-Exon 6 | 22 | 1 | GACTCTGATGACATATTTTTCCCC | TTTA | 303 |
| Human-Exon 6 | 23 | 1 | TCCCCAGTATGGTTCCAGATCATG | TTTT | 304 |
| Human-Exon 6 | 24 | 1 | CCCCAGTATGGTTCCAGATCATGT | TTTT | 305 |
| Human-Exon 6 | 25 | 1 | CCCAGTATGGTTCCAGATCATGTC | TTTC | 306 |
| Human-Exon 7 | 1 | 1 | TATTTGTCTTtgtgtatgtgtgta | TTTA | 307 |
| Human-Exon 7 | 2 | 1 | TCTTtgtgtatgtgtgtatgtgta | TTTG | 308 |
| Human-Exon 7 | 3 | 1 | tgtatgtgtgtatgtgtatgtgtt | TTtg | 309 |
| Human-Exon 7 | 4 | 1 | AGGCCAGACCTATTTGACTGGAAT | ttTT | 310 |
| Human-Exon 7 | 5 | 1 | GGCCAGACCTATTTGACTGGAATA | tTTA | 311 |
| Human-Exon 7 | 6 | 1 | ACTGGAATAGTGTGGTTTGCCAGC | TTTG | 312 |
| Human-Exon 7 | 7 | 1 | CCAGCAGTCAGCCACACAACGACT | TTTG | 313 |
| Human-Exon 7 | 8 | -1 | TCTATGCCTAATTGATATCTGGCG | TTTC | 314 |
| Human-Exon 7 | 9 | -1 | CCAACCTTCAGGATCGAGTAGTTT | TTTA | 315 |
| Human-Exon 7 | 10 | 1 | TGGACTACCACTGCTTTTAGTATG | TTTC | 316 |
| Human-Exon 7 | 11 | 1 | AGTATGGTAGAGTTTAATGTTTTC | TTTT | 317 |
| Human-Exon 7 | 12 | 1 | GTATGGTAGAGTTTAATGTTTTCA | TTTA | 318 |
| Human-Exon 8 | 1 | -1 | AGACTCTAAAAGGATAATGAACAA | TTTG | 319 |
| Human-Exon 8 | 2 | 1 | ACTTTGATTTGTTCATTATCCTTT | TTTA | 320 |
| Human-Exon 8 | 3 | -1 | TATATTTGAGACTCTAAAAGGATA | TTTC | 321 |
| Human-Exon 8 | 4 | 1 | ATTTGTTCATTATCCTTTTAGAGT | TTTG | 322 |
| Human-Exon 8 | 5 | -1 | GTTTCTATATTTGAGACTCTAAAA | TTTG | 323 |
| Human-Exon 8 | 6 | -1 | GGTTTCTATATTTGAGACTCTAAA | TTTT | 324 |
| Human-Exon 8 | 7 | -1 | TGGTTTCTATATTTGAGACTCTAA | TTTT | 325 |
| Human-Exon 8 | 8 | 1 | TTCATTATCCTTTTAGAGTCTCAA | TTTG | 326 |
| Human-Exon 8 | 9 | 1 | AGAGTCTCAAATATAGAAACCAAA | TTTT | 327 |
| Human-Exon 8 | 10 | 1 | GAGTCTCAAATATAGAAACCAAAA | TTTA | 328 |
| Human-Exon 8 | 11 | -1 | CACTTCCTGGATGGCTTCAATGCT | TTTC | 329 |
| Human-Exon 8 | 12 | 1 | GCCTCAACAAGTGAGCATTGAAGC | TTTT | 330 |
| Human-Exon 8 | 13 | 1 | CCTCAACAAGTGAGCATTGAAGCC | TTTG | 331 |
| Human-Exon 8 | 14 | -1 | GGTGGCCTTGGCAACATTTCCACT | TTTA | 332 |
| Human-Exon 8 | 15 | -1 | GTCACTTTAGGTGGCCTTGGCAAC | TTTA | 333 |
| Human-Exon 8 | 16 | -1 | ATGATGTAACTGAAAATGTTCTTC | TTTG | 334 |
| Human-Exon 8 | 17 | -1 | CCTGTTGAGAATAGTGCATTTGAT | TTTA | 335 |
| Human-Exon 8 | 18 | 1 | CAGTTACATCATCAAATGCACTAT | TTTT | 336 |
| Human-Exon 8 | 19 | 1 | AGTTACATCATCAAATGCACTATT | TTTC | 337 |
| Human-Exon 8 | 20 | -1 | CACACTTTACCTGTTGAGAATAGT | TTTA | 338 |
| Human-Exon 8 | 21 | 1 | CTGTTTTATATGCATTTTTAGGTA | TTTT | 339 |
| Human-Exon 8 | 22 | 1 | TGTTTTATATGCATTTTTAGGTAT | TTTC | 340 |
| Human-Exon 8 | 23 | 1 | ATATGCATTTTTAGGTATTACGTG | TTTT | 341 |
| Human-Exon 8 | 24 | 1 | TATGCATTTTTAGGTATTACGTGC | TTTA | 342 |
| Human-Exon 8 | 25 | 1 | TAGGTATTACGTGCACatatatat | TTTT | 343 |
| Human-Exon 8 | 26 | 1 | AGGTATTACGTGCACatatatata | TTTT | 344 |
| Human-Exon 8 | 27 | 1 | GGTATTACGTGCACatatatatat | TTTA | 345 |
| Human-Exon 55 | 1 | -1 | AGCAACAACTATAATATTGTGCAG | TTTA | 346 |
| Human-Exon 55 | 2 | 1 | GTTCCTCCATCTTTCTCTTTTTAT | TTTA | 347 |
| Human-Exon 55 | 3 | 1 | TCTTTTTATGGAGTTCACTAGGTG | TTTC | 348 |
| Human-Exon 55 | 4 | 1 | TATGGAGTTCACTAGGTGCACCAT | TTTT | 349 |
| Human-Exon 55 | 5 | 1 | ATGGAGTTCACTAGGTGCACCATT | TTTT | 350 |
| Human-Exon 55 | 6 | 1 | TGGAGTTCACTAGGTGCACCATTC | TTTA | 351 |
| Human-Exon 55 | 7 | 1 | ATAATTGCATCTGAACATTTGGTC | TTTA | 352 |
| Human-Exon 55 | 8 | 1 | GTCCTTTGCAGGGTGAGTGAGCGA | TTTG | 353 |
| Human-Exon 55 | 9 | -1 | TTCCAAAGCAGCCTCTCGCTCACT | TTTC | 354 |
| Human-Exon 55 | 10 | 1 | CAGGGTGAGTGAGCGAGAGGCTGC | TTTG | 355 |
| Human-Exon 55 | 11 | 1 | GAAGAAACTCATAGATTACTGCAA | TTTG | 356 |
| Human-Exon 55 | 12 | -1 | CAGGTCCAGGGGGAACTGTTGCAG | TTTC | 357 |
| Human-Exon 55 | 13 | -1 | CCAGGTCCAGGGGGAACTGTTGCA | TTTT | 358 |
| Human-Exon 55 | 14 | -1 | AGCTTCTGTAAGCCAGGCAAGAAA | TTTC | 359 |
| Human-Exon 55 | 15 | 1 | TTGCCTGGCTTACAGAAGCTGAAA | TTTC | 360 |
| Human-Exon 55 | 16 | -1 | CTTACGGGTAGCATCCTGTAGGAC | TTTC | 361 |
| Human-Exon 55 | 17 | -1 | CTCCCTTGGAGTCTTCTAGGAGCC | TTTA | 362 |
| Human-Exon 55 | 18 | -1 | ACTCCCTTGGAGTCTTCTAGGAGC | TTTT | 363 |
| Human-Exon 55 | 19 | -1 | ATCAGCTCTTTTACTCCCTTGGAG | TTTC | 364 |
| Human-Exon 55 | 20 | 1 | CGCTTTAGCACTCTTGTGGATCCA | TTTC | 365 |
| Human-Exon 55 | 21 | 1 | GCACTCTTGTGGATCCAATTGAAC | TTTA | 366 |
| Human-Exon 55 | 22 | -1 | TCCCTGGCTTGTCAGTTACAAGTA | TTTG | 367 |
| Human-Exon 55 | 23 | -1 | GTCCCTGGCTTGTCAGTTACAAGT | TTTT | 368 |
| Human-Exon 55 | 24 | -1 | TTTTGTCCCTGGCTTGTCAGTTAC | TTTG | 369 |
| Human-Exon 55 | 25 | -1 | GTTTTGTCCCTGGCTTGTCAGTTA | TTTT | 370 |
| Human-Exon 55 | 26 | 1 | TACTTGTAACTGACAAGCCAGGGA | TTTG | 371 |
| Human-G1-exon51 | | 1 | gCTCCTACTCAGACTGTTACTCTG | TTTA | 372 |
| Human-G2-exon51 | | 1 | taccatgtattgctaaacaaagta | TTTC | 373 |
| Human-G3-exon51 | | -1 | attgaagagtaacaatttgagcca | TTTA | 374 |
| mouse-Exon23-G1 | | 1 | aggctctgcaaagttctTTGAAAG | TTTG | 375 |
| mouse-Exon23-G2 | | 1 | AAAGAGCAACAAAATGGCttcaac | TTTG | 376 |
| mouse-Exon23-G3 | | 1 | AAAGAGCAATAAAATGGCttcaac | TTTG | 377 |
| mouse-Exon23-G4 | | -1 | AAAGAACTTTGCAGAGCctcaaaa | TTTC | 378 |
| mouse-Exon23-G5 | | -1 | ctgaatatctatgcattaataact | TTTA | 379 |
| mouse-Exon23-G6 | | -1 | tattatattacagggcatattata | TTTC | 380 |
| mouse-Exon23-G7 | | 1 | Aggtaagccgaggtttggccttta | TTTC | 381 |
| mouse-Exon23-G8 | | 1 | cccagagtccttcaaagatattga | TTTA | 382 |

*In this table, upper case letters represent nucleotides that align to the exon sequence of the gene. Lower case letters represent nucleotides that align to the intron sequence of the gene.

TABLE 7
gRNA sequences

| Targeted | | | | | SEQ ID |
|---|---|---|---|---|---|
| gRNA Exon | Guide # | Strand | gRNA sequence* | PAM | NO. |
| Human-Exon 51 | 4 | 1 | aaaaaggaaaaaagaagaaaaaga | tttt | 383 |
| Human-Exon 51 | 5 | 1 | Caaaaaggaaaaaagaagaaaaag | tttt | 384 |
| Human-Exon 51 | 6 | 1 | GCaaaaaggaaaaaagaagaaaaa | tttc | 385 |
| Human-Exon 51 | 7 | 1 | UUUUGCaaaaaggaaaaaagaaga | tttt | 386 |
| Human-Exon 51 | 8 | 1 | UUUUUGCaaaaaggaaaaaagaag | tttt | 387 |
| Human-Exon 51 | 9 | 1 | GUUUUUGCaaaaaggaaaaaagaa | tttc | 388 |
| Human-Exon 51 | 10 | 1 | AUUUUGGGUUUUUGCaaaaaggaa | tttt | 389 |
| Human-Exon 51 | 11 | 1 | UAUUUUGGGUUUUUGCaaaaagga | tttt | 390 |
| Human-Exon 51 | 12 | 1 | AUAUUUUGGGUUUUUGCaaaaagg | tttt | 391 |
| Human-Exon 51 | 13 | 1 | AAUAUUUUGGGUUUUUGCaaaaag | tttc | 392 |
| Human-Exon 51 | 14 | 1 | GCUAAAAUAUUUUGGGUUUUUGCa | tttt | 393 |
| Human-Exon 51 | 15 | 1 | AGCUAAAAUAUUUUGGGUUUUUGC | tttt | 394 |
| Human-Exon 51 | 16 | 1 | GAGCUAAAAUAUUUUGGGUUUUUG | tttG | 395 |
| Human-Exon 51 | 17 | 1 | AGAGUAACAGUCUGAGUAGGAGCU | TTTT | 396 |
| Human-Exon 51 | 18 | 1 | CAGAGUAACAGUCUGAGUAGGAGC | TTTA | 397 |
| Human-Exon 51 | 19 | -1 | GUGACACAACCUGUGGUUACUAAG | TTTC | 398 |
| Human-Exon 51 | 20 | -1 | GGUUACUAAGGAAACUGCCAUCU | TTTG | 399 |
| Human-Exon 51 | 21 | -1 | AAGGAAACUGCCAUCUCCAAACUA | TTTC | 400 |
| Human-Exon 51 | 22 | -1 | AUCAUCAAGCAGAAGGUAUGAGAA | TTTT | 401 |
| Human-Exon 51 | 23 | -1 | AGCAGAAGGUAUGAGAAAAAAUGA | TTTA | 402 |
| Human-Exon 51 | 24 | -1 | GCAGAAGGUAUGAGAAAAAAUGAU | TTTT | 403 |
| Human-Exon 51 | 25 | -1 | UAAAAGUUGGCAGAAGUUUUUCUU | TTTA | 404 |
| Human-Exon 51 | 26 | -1 | AAAAGUUGGCAGAAGUUUUUCUUU | TTTT | 405 |
| Human-Exon 51 | 27 | 1 | GGUGGAAAAUCUUCAUUUUAAAGA | TTTT | 406 |
| Human-Exon 51 | 28 | 1 | UGGUGGAAAAUCUUCAUUUUAAAG | TTTT | 407 |
| Human-Exon 51 | 29 | 1 | UUGGUGGAAAAUCUUCAUUUUAAA | TTTC | 408 |
| Human-Exon 51 | 30 | 1 | GUGAUUGGUGGAAAAUCUUCAUUU | TTTA | 409 |
| Human-Exon 51 | 31 | 1 | CUAGGAGAGUAAAGUGAUUGGUGG | TTTT | 410 |
| Human-Exon 51 | 32 | 1 | UCUAGGAGAGUAAAGUGAUUGGUG | TTTC | 411 |
| Human-Exon 51 | 33 | 1 | CUGGUGGGAAAUGGUCUAGGAGA | TTTA | 412 |
| Human-Exon 45 | 1 | -1 | guagcacacuguuuaaucuuuucu | tttg | 413 |
| Human-Exon 45 | 2 | -1 | cacacuguuuaaucuuuucucaaa | TTTa | 414 |
| Human-Exon 45 | 3 | -1 | acacuguuuaaucuuuucucaaau | TTTT | 415 |
| Human-Exon 45 | 4 | -1 | cacuguuuaaucuuuucucaaauA | TTTT | 416 |
| Human-Exon 45 | 5 | 1 | AUGUCUUUUUauuugagaaaagau | ttta | 417 |
| Human-Exon 45 | 6 | 1 | AAGCCCCAUGUCUUUUUauuugag | tttt | 418 |
| Human-Exon 45 | 7 | 1 | GAAGCCCCAUGUCUUUUUauuuga | tttc | 419 |
| Human-Exon 45 | 8 | 1 | GUAAGAUACCAAAAAGGCAAAACA | TTTT | 420 |
| Human-Exon 45 | 9 | 1 | UGUAAGAUACCAAAAAGGCAAAAC | TTTT | 421 |
| Human-Exon 45 | 10 | 1 | CUGUAAGAUACCAAAAAGGCAAAA | TTTG | 422 |
| Human-Exon 45 | 11 | 1 | GUUCCUGUAAGAUACCAAAAAGGC | TTTT | 423 |
| Human-Exon 45 | 12 | 1 | AGUUCCUGUAAGAUACCAAAAAGG | TTTG | 424 |
| Human-Exon 45 | 13 | 1 | UCCUGGAGUUCCUGUAAGAUACCA | TTTT | 425 |
| Human-Exon 45 | 14 | 1 | AUCCUGGAGUUCCUGUAAGAUACC | TTTT | 426 |
| Human-Exon 45 | 15 | -1 | GGGAAGAAAUAAUUCAGCAAUCCU | TTTG | 427 |
| Human-Exon 45 | 16 | -1 | GGAAGAAAUAAUUCAGCAAUCCUC | TTTT | 428 |
| Human-Exon 45 | 17 | -1 | GAAGAAAUAAUUCAGCAAUCCUCA | TTTT | 429 |
| Human-Exon 45 | 18 | -1 | AAAACAGAUGCCAGUAUUCUACAG | TTTC | 430 |
| Human-Exon 45 | 19 | -1 | AAACAGAUGCCAGUAUUCUACAGG | TTTT | 431 |
| Human-Exon 45 | 20 | -1 | AACAGAUGCCAGUAUUCUACAGGA | TTTT | 432 |
| Human-Exon 45 | 21 | -1 | GAAUCUGCGGUGGCAGGAGGUCUG | TTTG | 433 |
| Human-Exon 45 | 22 | -1 | AGGUCUGCAAACAGCUGUCAGACA | TTTC | 434 |
| Human-Exon 45 | 23 | -1 | GGUCUGCAAACAGCUGUCAGACAG | TTTT | 435 |
| Human-Exon 45 | 24 | -1 | GUCUGCAAACAGCUGUCAGACAGA | TTTT | 436 |
| Human-Exon 45 | 25 | -1 | UCUGCAAACAGCUGUCAGACAGAA | TTTT | 437 |
| Human-Exon 45 | 26 | -1 | UAGGGCGACAGAUCUAAUAGGAAU | TTTC | 438 |
| Human-Exon 45 | 27 | -1 | AGGGCGACAGAUCUAAUAGGAAUG | TTTT | 439 |
| Human-Exon 45 | 28 | 1 | UAAAGAAAGCUUAAAAAGUCUGCU | TTTT | 440 |
| Human-Exon 45 | 29 | 1 | CUAAAGAAAGCUUAAAAAGUCUGC | TTTA | 441 |
| Human-Exon 45 | 30 | 1 | AAAUAUUCUUCUAAAGAAAGCUUA | TTTT | 442 |
| Human-Exon 45 | 31 | 1 | GAAAUAUUCUUCUAAAGAAAGCUU | TTTT | 443 |
| Human-Exon 45 | 32 | 1 | UGAAAUAUUCUUCUAAAGAAAGCU | TTTA | 444 |
| Human-Exon 45 | 33 | 1 | UCUCUCAUGAAAUAUUCUUCUAAA | TTTC | 445 |
| Human-Exon 45 | 34 | 1 | AUAAUCUCUCAUGAAAUAUUCUUC | TTTA | 446 |
| Human-Exon 44 | 1 | 1 | GCGUAUAUUUUUUGGUUAUACUGA | TTTG | 447 |
| Human-Exon 44 | 2 | 1 | ucaagaaaaauagauggauuaugu | tttt | 448 |
| Human-Exon 44 | 3 | 1 | aucaagaaaaauagauggauuaug | ttta | 449 |
| Human-Exon 44 | 4 | 1 | CAGGUaaaagcauauggaucaaga | tttt | 450 |
| Human-Exon 44 | 5 | 1 | GCAGGUaaaagcauauggaucaag | tttt | 451 |
| Human-Exon 44 | 6 | 1 | UGCAGGUaaaagcauauggaucaa | tttc | 452 |
| Human-Exon 44 | 7 | -1 | CAGGCGAUUUGACAGAUCUGUUGA | TTTC | 453 |
| Human-Exon 44 | 8 | 1 | AGAUCUGUCAAAUCGCCUGCAGGU | tttt | 454 |
| Human-Exon 44 | 9 | 1 | CAGAUCUGUCAAAUCGCCUGCAGG | tttA | 455 |
| Human-Exon 44 | 10 | 1 | GCCGCCAUUUCUCAACAGAUCUGU | TTTG | 456 |
| Human-Exon 44 | 11 | -1 | AAUGGCGGCGUUUUCAUUAUGAUA | TTTA | 457 |
| Human-Exon 44 | 12 | 1 | AUUAAAUAUCUUUAUAUCAUAAUG | TTTT | 458 |
| Human-Exon 44 | 13 | -1 | UGAGAAUUGGGAACAUGCUAAAUA | TTTG | 459 |
| Human-Exon 44 | 14 | -1 | GGUAAGUCUUUGAUUUGUUUUUUC | TTTC | 460 |
| Human-Exon 44 | 15 | 1 | AAAUACAAUUUCGAAAAAACAAAU | TTTG | 461 |
| Human-Exon 44 | 16 | 1 | AAGAUAAAUACAAUUUCGAAAAAA | TTTG | 462 |
| Human-Exon 44 | 17 | 1 | GCUGAAGAUAAAUACAAUUUCGAA | TTTT | 463 |
| Human-Exon 44 | 18 | 1 | UGCUGAAGAUAAAUACAAUUUCGA | TTTT | 464 |
| Human-Exon 44 | 19 | 1 | GUGCUGAAGAUAAAUACAAUUUCG | TTTT | 465 |
| Human-Exon 44 | 20 | 1 | UGUGCUGAAGAUAAAUACAAUUUC | TTTC | 466 |
| Human-Exon 44 | 21 | -1 | GCACAUCUGGACUCUUUAACUUCU | TTTA | 467 |
| Human-Exon 44 | 22 | 1 | UAAAGAGUCCAGAUGUGCUGAAGA | TTTA | 468 |
| Human-Exon 44 | 23 | -1 | AAGAUCAGGUUCUGAAGGGUGAUG | TTTC | 469 |
| Human-Exon 44 | 24 | 1 | UUCAGAACCUGAUCUUUAAGAAGU | TTTA | 470 |
| Human-Exon 44 | 25 | 1 | AAUAUAAUGAUGACAACAACAGUC | TTTT | 471 |
| Human-Exon 44 | 26 | 1 | UAAUAUAAUGAUGACAACAACAGU | TTTG | 472 |
| Human-Exon 53 | 1 | -1 | UUUAUUUUUCCUUUUAUUCUAGUU | TTTC | 473 |
| Human-Exon 53 | 2 | 1 | AAAGGAAAAAUAAAUAUAUAGUAG | TTTA | 474 |
| Human-Exon 53 | 3 | 1 | UUUCAACUAGAAUAAAAGGAAAAA | TTTA | 475 |
| Human-Exon 53 | 4 | 1 | AUUCUUUCAACUAGAAUAAAAGGA | TTTT | 476 |
| Human-Exon 53 | 5 | 1 | AAUUCUUUCAACUAGAAUAAAAGG | TTTT | 477 |
| Human-Exon 53 | 6 | 1 | GAAUUCUUUCAACUAGAAUAAAAG | TTTC | 478 |
| Human-Exon 53 | 7 | 1 | AUUCUGAAUUCUUUCAACUAGAAU | TTTT | 479 |
| Human-Exon 53 | 8 | 1 | GAUUCUGAAUUCUUUCAACUAGAA | TTTA | 480 |
| Human-Exon 53 | 9 | -1 | CAGAACCGGAGGCAACAGUUGAAU | TTTC | 481 |
| Human-Exon 53 | 10 | -1 | GGAGGCAACAGUUGAAUGAAAUGU | TTTA | 482 |
| Human-Exon 53 | 11 | -1 | UAUACAGUAGAUGCAAUCCAAAAG | TTTT | 483 |
| Human-Exon 53 | 12 | -1 | GAUGCAAUCCAAAAGAAAAUCACA | TTTC | 484 |
| Human-Exon 53 | 13 | -1 | AAUCACAGAAACCAAGGUUAGUAU | TTTG | 485 |
| Human-Exon 53 | 14 | -1 | AGGUUAGUAUCAAAGAUACCUUU | TTTA | 486 |
| Human-Exon 53 | 15 | -1 | GGUUAGUAUCAAAGAUACCUUUUU | TTTT | 487 |
| Human-Exon 53 | 16 | -1 | AGUAUCAAAGAUACCUUUUUAAAA | TTTA | 488 |
| Human-Exon 53 | 17 | -1 | GUAUCAAAGAUACCUUUUUAAAAU | TTTT | 489 |
| Human-Exon 46 | 1 | -1 | UGUUUGUGUCCCAGUUUGCAUUAA | TTTG | 490 |
| Human-Exon 46 | 2 | 1 | CUGGGACACAAACAUGGCAAUUUA | TTTT | 491 |
| Human-Exon 46 | 3 | 1 | ACUGGGACACAAACAUGGCAAUUU | TTTT | 492 |
| Human-Exon 46 | 4 | 1 | AACUGGGACACAAACAUGGCAAUU | TTTA | 493 |
| Human-Exon 46 | 5 | 1 | UAUUUGUUAAUGCAAACUGGGACA | TTTG | 494 |
| Human-Exon 46 | 6 | -1 | ACAAAUAGUUUGAGAACUAUGUUG | tttC | 495 |
| Human-Exon 46 | 7 | -1 | CAAAUAGUUUGAGAACUAUGUUGG | tttt | 496 |
| Human-Exon 46 | 8 | -1 | AAAUAGUUUGAGAACUAUGUUGGa | tttt | 497 |
| Human-Exon 46 | 9 | -1 | AUAGUUUGAGAACUAUGUUGGaaa | tilt | 498 |
| Human-Exon 46 | 10 | -1 | UAGUUUGAGAACUAUGUUGGaaaa | tttt | 499 |
| Human-Exon 46 | 11 | -1 | AGUUUGAGAACUAUGUUGGaaaaa | tttt | 500 |
| Human-Exon 46 | 12 | 1 | UAGUUCUCAAACUAUUUGUUAAUG | TTTG | 501 |
| Human-Exon 46 | 13 | 1 | UAuuuuuuuuuCCAACAUAGUUCU | TTTG | 502 |
| Human-Exon 46 | 14 | -1 | CUUCUUUCUCCAGGCUAGAAGAAC | TTTT | 503 |
| Human-Exon 46 | 15 | 1 | CUUCUAGCCUGGAGAAAGAAGAAU | TTTT | 504 |
| Human-Exon 46 | 16 | 1 | UCUUCUAGCCUGGAGAAAGAAGAA | TTTA | 505 |
| Human-Exon 46 | 17 | 1 | AUUCUUUUGUUCUUCUAGCCUGGA | TTTC | 506 |
| Human-Exon 46 | 18 | -1 | CAAAAGAAUAUCUUGUCAGAAUUU | TTTG | 507 |
| Human-Exon 46 | 19 | -1 | CUGGAAAAGAGCAGCAACUAAAAG | TTTT | 508 |
| Human-Exon 46 | 20 | -1 | CAAGUCAAGGUAAUUUUAUUUUCU | TTTG | 509 |
| Human-Exon 46 | 21 | -1 | CAAAUCCCCCAGGGCCUGCUUGCA | TTTA | 510 |
| Human-Exon 46 | 22 | 1 | AGGCCCUGGGGGAUUUGAGAAAAU | TTTT | 511 |
| Human-Exon 46 | 23 | 1 | CAGGCCCUGGGGGAUUUGAGAAAA | TTTA | 512 |
| Human-Exon 46 | 24 | 1 | CAAGCAGGCCCUGGGGGAUUUGAG | TTTT | 513 |
| Human-Exon 46 | 25 | 1 | GCAAGCAGGCCCUGGGGGAUUUGA | TTTC | 514 |
| Human-Exon 46 | 26 | 1 | GCAGAAAACCAAUGAUUGAAUUAA | TTTT | 515 |
| Human-Exon 46 | 27 | 1 | GGCAGAAAACCAAUGAUUGAAUUA | TTTT | 516 |
| Human-Exon 46 | 28 | 1 | GGGCAGAAAACCAAUGAUUGAAUU | TTTT | 517 |
| Human-Exon 46 | 29 | 1 | UGGGCAGAAAACCAAUGAUUGAAU | TTTA | 518 |
| Human-Exon 46 | 30 | -1 | AUUAGGUUAUUCAUAGUUCCUUGC | TTTA | 519 |
| Human-Exon 46 | 31 | 1 | AACUAUGAAUAACCUAAUGGGCAG | TTTT | 520 |
| Human-Exon 46 | 32 | 1 | GAACUAUGAAUAACCUAAUGGGCA | TTTC | 521 |
| Human-Exon 52 | 1 | -1 | UAUUUCCUGUUAAAUUGUUUUCUA | TTTA | 522 |
| Human-Exon 52 | 2 | 1 | GGUUUAUAGAAAACAAUUUAACAG | TTTC | 523 |
| Human-Exon 52 | 3 | -1 | AUACAGUAACAUCUUUUUUAUUUC | TTTA | 524 |
| Human-Exon 52 | 4 | -1 | UACAGUAACAUCUUUUUUAUUUCU | TTTT | 525 |
| Human-Exon 52 | 5 | 1 | AUGUUACUGUAUAAGGGUUUAUAG | TTTT | 526 |
| Human-Exon 52 | 6 | 1 | GAUGUUACUGUAUAAGGGUUUAUA | TTTC | 527 |
| Human-Exon 52 | 7 | 1 | CAGCCAAAACACUUUUAGAAAUAA | TTTT | 528 |
| Human-Exon 52 | 8 | 1 | CCAGCCAAAACACUUUUAGAAAUA | TTTT | 529 |
| Human-Exon 52 | 9 | 1 | ACCAGCCAAAACACUUUUAGAAAU | TTTT | 530 |
| Human-Exon 52 | 10 | 1 | GACCAGCCAAAACACUUUUAGAAA | TTTA | 531 |
| Human-Exon 52 | 11 | 1 | GUGAGACCAGCCAAAACACUUUUA | TTTC | 532 |
| Human-Exon 52 | 12 | -1 | AAUUGUACUUUACUUUGUAUUAUG | TTTA | 533 |
| Human-Exon 52 | 13 | -1 | AUUGUACUUUACUUUGUAUUAUGU | TTTT | 534 |
| Human-Exon 52 | 14 | 1 | UAAAGUACAAUUGUGAGACCAGCC | TTTT | 535 |
| Human-Exon 52 | 15 | 1 | GUAAAGUACAAUUGUGAGACCAGC | TTTG | 536 |
| Human-Exon 52 | 16 | 1 | GUAUUCCUUUUACAUAAUACAAAG | TTTA | 537 |
| Human-Exon 52 | 17 | 1 | GUUGUGUAUUCCUUUUACAUAAUA | TTTG | 538 |
| Human-Exon 52 | 18 | 1 | AUCCUGCAUUGUUGCCUGUAAGAA | TTTG | 539 |
| Human-Exon 52 | 19 | 1 | UUCCAACUGGGGACGCCUCUGUUC | TTTG | 540 |
| Human-Exon 52 | 20 | -1 | UUGGAAGAACUCAUUACCGCUGCC | TTTG | 541 |
| Human-Exon 52 | 21 | -1 | UCAUUACCGCUGCCCAAAAUUUGA | TTTT | 542 |
| Human-Exon 52 | 22 | 1 | CUCUUGAUUGCUGGUCUUGUUUUU | TTTG | 543 |
| Human-Exon 52 | 23 | -1 | GUUUUUUAACAAGCAUGGGACACA | TTTG | 544 |
| Human-Exon 52 | 24 | 1 | CUUUGUGUGUCCCAUGCUUGUUAA | TTTT | 545 |
| Human-Exon 52 | 25 | 1 | GCUUUGUGUGUCCCAUGCUUGUUA | TTTT | 546 |
| Human-Exon 52 | 26 | 1 | UGCUUUGUGUGUCCCAUGCUUGUU | TTTT | 547 |
| Human-Exon 52 | 27 | 1 | UUGCUUUGUGUGUCCCAUGCUUGU | TTTA | 548 |
| Human-Exon 52 | 28 | -1 | AGCAAGAUGCAUGACAAGUUUCAA | TTTA | 549 |
| Human-Exon 52 | 29 | -1 | GCAAGAUGCAUGACAAGUUUCAAU | TTTT | 550 |
| Human-Exon 52 | 30 | -1 | CAAGAUGCAUGACAAGUUUCAAUA | TTTT | 551 |
| Human-Exon 52 | 31 | 1 | GAUAUAUGAACUUAAGUUUUUAUU | TTTC | 552 |
| Human-Exon 50 | 1 | -1 | AUAGAAAUCCAAUAAUAUAUUCAC | TTTG | 553 |
| Human-Exon 50 | 2 | -1 | AUUAAGAUGUUCAUGAAUUAUCUU | TTTG | 554 |
| Human-Exon 50 | 3 | -1 | UAAGUAAUGUGUAUGCUUUUCUGU | TTTA | 555 |
| Human-Exon 50 | 4 | 1 | AUCUUCUAACUUCCUCUUUAACAG | TTTT | 556 |
| Human-Exon 50 | 5 | 1 | GAUCUUCUAACUUCCUCUUUAACA | TTTC | 557 |
| Human-Exon 50 | 6 | -1 | AUCUGAGCUCUGAGUGGAAGGCGG | TTTA | 558 |
| Human-Exon 50 | 7 | -1 | ACCGUUUACUUCAAGAGCUGAGGG | TTTG | 559 |
| Human-Exon 50 | 8 | 1 | CUGCUUUGCCCUCAGCUCUUGAAG | TTTA | 560 |
| Human-Exon 50 | 9 | -1 | UCUCUUUGGCUCUAGCUAUUUGUU | TTTG | 561 |
| Human-Exon 50 | 10 | -1 | CUCUUUGGCUCUAGCUAUUUGUUC | TTTT | 562 |
| Human-Exon 50 | 11 | 1 | CACUUUUGAACAAAUAGCUAGAGC | TTTG | 563 |
| Human-Exon 50 | 12 | 1 | UCACUUCAUAGUUGCACUUUUGAA | TTTG | 564 |
| Human-Exon 50 | 13 | -1 | AUGAAGUGAUGACUGGGUGAGAGA | TTTC | 565 |
| Human-Exon 50 | 14 | -1 | UGAAGUGAUGACUGGGUGAGAGAG | TTTT | 566 |
| Human-Exon 43 | 1 | 1 | AAGAGAAAAauauauauauauaua | TTTG | 567 |
| Human-Exon 43 | 2 | 1 | GAAUUAGCUGUCUAUAGAAAGAGA | tTTT | 568 |
| Human-Exon 43 | 3 | 1 | UGAAUUAGCUGUCUAUAGAAAGAG | TTTT | 569 |
| Human-Exon 43 | 4 | -1 | AGCUAAUUCAUUUUUUUACUGUUU | TTTA | 570 |
| Human-Exon 43 | 5 | 1 | AUGAAUUAGCUGUCUAUAGAAAGA | TTTC | 571 |
| Human-Exon 43 | 6 | -1 | GCUAAUUCAUUUUUUUACUGUUUU | TTTT | 572 |
| Human-Exon 43 | 7 | 1 | AAAAAAAUGAAUUAGCUGUCUAUA | TTTC | 573 |
| Human-Exon 43 | 8 | -1 | UUAAAAUUUUUAUAUUACAGAAUA | TTTA | 574 |
| Human-Exon 43 | 9 | -1 | UAAAAUUUUUAUAUUACAGAAUAU | TTTT | 575 |
| Human-Exon 43 | 10 | 1 | AUAUAAAAAUUUUAAAACAGUAAA | TTTT | 576 |
| Human-Exon 43 | 11 | 1 | AAUAUAAAAAUUUUAAAACAGUAA | TTTT | 577 |
| Human-Exon 43 | 12 | 1 | UAAUAUAAAAAUUUUAAAACAGUA | TTTT | 578 |
| Human-Exon 43 | 13 | 1 | GUAAUAUAAAAAUUUUAAAACAGU | TTTT | 579 |
| Human-Exon 43 | 14 | 1 | UGUAAUAUAAAAAUUUUAAAACAG | TTTA | 580 |
| Human-Exon 43 | 15 | 1 | UAUAUUCUGUAAUAUAAAAAUUUU | TTTT | 581 |
| Human-Exon 43 | 16 | 1 | UUAUAUUCUGUAAUAUAAAAAUUU | TTTA | 582 |
| Human-Exon 43 | 17 | -1 | CAGAAUAUAAAAGAUAGUCUACAA | TTTG | 583 |
| Human-Exon 43 | 18 | 1 | CUAUCUUUUAUAUUCUGUAAUAUA | TTTT | 584 |
| Human-Exon 43 | 19 | 1 | ACUAUCUUUUAUAUUCUGUAAUAU | TTTT | 585 |
| Human-Exon 43 | 20 | 1 | GACUAUCUUUUAUAUUCUGUAAUA | TTTA | 586 |
| Human-Exon 43 | 21 | -1 | CAUAGCAAGAAGACAGCAGCAUUG | TTTG | 587 |
| Human-Exon 43 | 22 | 1 | CAUUUUGUUAACUUUUUCCCAUUG | TTTC | 588 |
| Human-Exon 43 | 23 | -1 | CAUAUAUUUUUCUUGAUACUUGCA | TTTC | 589 |
| Human-Exon 43 | 24 | 1 | AAAUCAUUUCUGCAAGUAUCAAGA | TTTT | 590 |
| Human-Exon 43 | 25 | 1 | CAAAUCAUUUCUGCAAGUAUCAAG | TTTT | 591 |
| Human-Exon 43 | 26 | 1 | ACAAAUCAUUUCUGCAAGUAUCAA | TTTC | 592 |
| Human-Exon 43 | 27 | 1 | AUAAAUUCUACAGUUCCCUGAAAA | TTTG | 593 |
| Human-Exon 43 | 28 | -1 | GAAUUUAUUUCAGUACCCUCCAUG | TTTC | 594 |
| Human-Exon 43 | 29 | -1 | AAUUUAUUUCAGUACCCUCCAUGG | TTTT | 595 |
| Human-Exon 43 | 30 | 1 | UGAAAUAAAUUCUACAGUUCCCUG | TTTT | 596 |
| Human-Exon 43 | 31 | -1 | AUUUAUUUCAGUACCCUCCAUGGA | TTTT | 597 |
| Human-Exon 43 | 32 | 1 | CUGAAAUAAAUUCUACAGUUCCCU | TTTC | 598 |
| Human-Exon 43 | 33 | -1 | UUUAUUUCAGUACCCUCCAUGGAA | TTTT | 599 |
| Human-Exon 43 | 34 | -1 | UACCCUCCAUGGAAAAAAGACAGG | TTTC | 600 |
| Human-Exon 43 | 35 | -1 | ACCCUCCAUGGAAAAAAGACAGGG | TTTT | 601 |
| Human-Exon 43 | 36 | -1 | CCCUCCAUGGAAAAAAGACAGGGA | TTTT | 602 |
| Human-Exon 43 | 37 | 1 | UUUUUUCCAUGGAGGGUACUGAAA | TTTA | 603 |
| Human-Exon 43 | 38 | 1 | UGUCUUUUUUCCAUGGAGGGUACU | TTTC | 604 |
| Human-Exon 6 | 1 | 1 | CCUUGAGCAAGAACCAUGCAAACU | TTTA | 605 |
| Human-Exon 6 | 2 | -1 | UGCUCAAGGAAUGCAUUUUCUUAU | TTTC | 606 |
| Human-Exon 6 | 3 | -1 | GCUCAAGGAAUGCAUUUUCUUAUG | TTTT | 607 |
| Human-Exon 6 | 4 | 1 | UGCAUUCCUUGAGCAAGAACCAUG | TTTG | 608 |
| Human-Exon 6 | 5 | -1 | GAAAAUUUAUUUCCACAUGUAGGU | TTTG | 609 |
| Human-Exon 6 | 6 | -1 | AAAAUUUAUUUCCACAUGUAGGUC | TTTT | 610 |
| Human-Exon 6 | 7 | -1 | AAAUUUAUUUCCACAUGUAGGUCA | TTTT | 611 |
| Human-Exon 6 | 8 | 1 | CAUGUGGAAAUAAAUUUUCAUAAG | TTTT | 612 |
| Human-Exon 6 | 9 | 1 | ACAUGUGGAAAUAAAUUUUCAUAA | TTTC | 613 |
| Human-Exon 6 | 10 | -1 | CCACAUGUAGGUCAAAAAUGUAAU | TTTC | 614 |
| Human-Exon 6 | 11 | -1 | CACAUGUAGGUCAAAAAUGUAAUG | TTTT | 615 |
| Human-Exon 6 | 12 | -1 | ACAUGUAGGUCAAAAAUGUAAUGA | TTTT | 616 |
| Human-Exon 6 | 13 | 1 | ACAUUUUUGACCUACAUGUGGAAA | TTTA | 617 |
| Human-Exon 6 | 14 | 1 | CAUUACAUUUUUGACCUACAUGUG | TTTC | 618 |
| Human-Exon 6 | 15 | -1 | AAAAAUAUCAUGGCUGGAUUGCAA | TTTG | 619 |
| Human-Exon 6 | 16 | -1 | GCUGGAUUGCAACAAACCAACAGU | TTTC | 620 |
| Human-Exon 6 | 17 | -1 | CUGGAUUGCAACAAACCAACAGUG | TTTT | 621 |
| Human-Exon 6 | 18 | 1 | CCUAUGACUAUGGAUGAGAGCAUU | TTTG | 622 |
| Human-Exon 6 | 19 | -1 | UAGGUAAGAAGAUUACUGAGACAU | TTTA | 623 |
| Human-Exon 6 | 20 | -1 | AUUACUGAGACAUUAAAUAACUUG | TTTA | 624 |
| Human-Exon 6 | 21 | -1 | UUACUGAGACAUUAAAUAACUUGU | TTTT | 625 |
| Human-Exon 6 | 22 | 1 | GGGGAAAAAUAUGUCAUCAGAGUC | TTTA | 626 |
| Human-Exon 6 | 23 | 1 | CAUGAUCUGGAACCAUACUGGGGA | TTTT | 627 |
| Human-Exon 6 | 24 | 1 | ACAUGAUCUGGAACCAUACUGGGG | TTTT | 628 |
| Human-Exon 6 | 25 | 1 | GACAUGAUCUGGAACCAUACUGGG | TTTC | 629 |
| Human-Exon 7 | 1 | 1 | uacacacauacacaAAGACAAAUA | TTTA | 630 |
| Human-Exon 7 | 2 | 1 | uacacauacacacauacacaAAGA | TTTG | 631 |
| Human-Exon 7 | 3 | 1 | aacacauacacauacacacauaca | TTtg | 632 |
| Human-Exon 7 | 4 | 1 | AUUCCAGUCAAAUAGGUCUGGCCU | ttTT | 633 |
| Human-Exon 7 | 5 | 1 | UAUUCCAGUCAAAUAGGUCUGGCC | tTTA | 634 |
| Human-Exon 7 | 6 | 1 | GCUGGCAAACCACACUAUUCCAGU | TTTG | 635 |
| Human-Exon 7 | 7 | 1 | AGUCGUUGUGUGGCUGACUGCUGG | TTTG | 636 |
| Human-Exon 7 | 8 | -1 | CGCCAGAUAUCAAUUAGGCAUAGA | TTTC | 637 |
| Human-Exon 7 | 9 | -1 | AAACUACUCGAUCCUGAAGGUUGG | TTTA | 638 |
| Human-Exon 7 | 10 | 1 | CAUACUAAAAGCAGUGGUAGUCCA | TTTC | 639 |
| Human-Exon 7 | 11 | 1 | GAAAACAUUAAACUCUACCAUACU | TTTT | 640 |
| Human-Exon 7 | 12 | 1 | UGAAAACAUUAAACUCUACCAUAC | TTTA | 641 |
| Human-Exon 8 | 1 | -1 | UUGUUCAUUAUCCUUUUAGAGUCU | TTTG | 642 |
| Human-Exon 8 | 2 | 1 | AAAGGAUAAUGAACAAAUCAAAGU | TTTA | 643 |
| Human-Exon 8 | 3 | -1 | UAUCCUUUUAGAGUCUCAAAUAUA | TTTC | 644 |
| Human-Exon 8 | 4 | 1 | ACUCUAAAAGGAUAAUGAACAAAU | TTTG | 645 |
| Human-Exon 8 | 5 | -1 | UUUUAGAGUCUCAAAUAUAGAAAC | TTTG | 646 |
| Human-Exon 8 | 6 | -1 | UUUAGAGUCUCAAAUAUAGAAACC | TTTT | 647 |
| Human-Exon 8 | 7 | -1 | UUAGAGUCUCAAAUAUAGAAACCA | TTTT | 648 |
| Human-Exon 8 | 8 | 1 | UUGAGACUCUAAAAGGAUAAUGAA | TTTG | 649 |
| Human-Exon 8 | 9 | 1 | UUUGGUUUCUAUAUUUGAGACUCU | TTTT | 650 |
| Human-Exon 8 | 10 | 1 | UUUUGGUUUCUAUAUUUGAGACUC | TTTA | 651 |
| Human-Exon 8 | 11 | -1 | AGCAUUGAAGCCAUCCAGGAAGUG | TTTC | 652 |
| Human-Exon 8 | 12 | 1 | GCUUCAAUGCUCACUUGUUGAGGC | TTTT | 653 |
| Human-Exon 8 | 13 | 1 | GGCUUCAAUGCUCACUUGUUGAGG | TTTG | 654 |
| Human-Exon 8 | 14 | -1 | AGUGGAAAUGUUGCCAAGGCCACC | TTTA | 655 |
| Human-Exon 8 | 15 | -1 | GUUGCCAAGGCCACCUAAAGUGAC | TTTA | 656 |
| Human-Exon 8 | 16 | -1 | GAAGAACAUUUUCAGUUACAUCAU | TTTG | 657 |
| Human-Exon 8 | 17 | -1 | AUCAAAUGCACUAUUCUCAACAGG | TTTA | 658 |
| Human-Exon 8 | 18 | 1 | AUAGUGCAUUUGAUGAUGUAACUG | TTTT | 659 |
| Human-Exon 8 | 19 | 1 | AAUAGUGCAUUUGAUGAUGUAACU | TTTC | 660 |
| Human-Exon 8 | 20 | -1 | ACUAUUCUCAACAGGUAAAGUGUG | TTTA | 661 |
| Human-Exon 8 | 21 | 1 | UACCUAAAAAUGCAUAUAAAACAG | TTTT | 662 |
| Human-Exon 8 | 22 | 1 | AUACCUAAAAAUGCAUAUAAAACA | TTTC | 663 |
| Human-Exon 8 | 23 | 1 | CACGUAAUACCUAAAAAUGCAUAU | TTTT | 664 |
| Human-Exon 8 | 24 | 1 | GCACGUAAUACCUAAAAAUGCAUA | TTTA | 665 |
| Human-Exon 8 | 25 | 1 | auauauauGUGCACGUAAUACCUA | TTTT | 666 |
| Human-Exon 8 | 26 | 1 | uauauauauGUGCACGUAAUACCU | TTTT | 667 |
| Human-Exon 8 | 27 | 1 | auauauauauGUGCACGUAAUACC | TTTA | 668 |
| Human-Exon 55 | 1 | -1 | CUGCACAAUAUUAUAGUUGUUGCU | TTTA | 669 |
| Human-Exon 55 | 2 | 1 | AUAAAAAGAGAAAGAUGGAGGAAC | TTTA | 670 |
| Human-Exon 55 | 3 | 1 | CACCUAGUGAACUCCAUAAAAAGA | TTTC | 671 |
| Human-Exon 55 | 4 | 1 | AUGGUGCACCUAGUGAACUCCAUA | TTTT | 672 |
| Human-Exon 55 | 5 | 1 | AAUGGUGCACCUAGUGAACUCCAU | TTTT | 673 |
| Human-Exon 55 | 6 | 1 | GAAUGGUGCACCUAGUGAACUCCA | TTTA | 674 |
| Human-Exon 55 | 7 | 1 | GACCAAAUGUUCAGAUGCAAUUAU | TTTA | 675 |
| Human-Exon 55 | 8 | 1 | UCGCUCACUCACCCUGCAAAGGAC | TTTG | 676 |
| Human-Exon 55 | 9 | -1 | AGUGAGCGAGAGGCUGCUUUGGAA | TTTC | 677 |
| Human-Exon 55 | 10 | 1 | GCAGCCUCUCGCUCACUCACCCUG | TTTG | 678 |
| Human-Exon 55 | 11 | 1 | UUGCAGUAAUCUAUGAGUUUCUUC | TTTG | 679 |
| Human-Exon 55 | 12 | -1 | CUGCAACAGUUCCCCCUGGACCUG | TTTC | 680 |
| Human-Exon 55 | 13 | -1 | UGCAACAGUUCCCCCUGGACCUGG | TTTT | 681 |
| Human-Exon 55 | 14 | -1 | UUUCUUGCCUGGCUUACAGAAGCU | TTTC | 682 |
| Human-Exon 55 | 15 | 1 | UUUCAGCUUCUGUAAGCCAGGCAA | TTTC | 683 |
| Human-Exon 55 | 16 | -1 | GUCCUACAGGAUGCUACCCGUAAG | TTTC | 684 |
| Human-Exon 55 | 17 | -1 | GGCUCCUAGAAGACUCCAAGGGAG | TTTA | 685 |
| Human-Exon 55 | 18 | -1 | GCUCCUAGAAGACUCCAAGGGAGU | TTTT | 686 |
| Human-Exon 55 | 19 | -1 | CUCCAAGGGAGUAAAAGAGCUGAU | TTTC | 687 |
| Human-Exon 55 | 20 | 1 | UGGAUCCACAAGAGUGCUAAAGCG | TTTC | 688 |
| Human-Exon 55 | 21 | 1 | GUUCAAUUGGAUCCACAAGAGUGC | TTTA | 689 |
| Human-Exon 55 | 22 | -1 | UACUUGUAACUGACAAGCCAGGGA | TTTG | 690 |
| Human-Exon 55 | 23 | -1 | ACUUGUAACUGACAAGCCAGGGAC | TTTT | 691 |
| Human-Exon 55 | 24 | -1 | GUAACUGACAAGCCAGGGACAAAA | TTTG | 692 |
| Human-Exon 55 | 25 | -1 | UAACUGACAAGCCAGGGACAAAAC | TTTT | 693 |
| Human-Exon 55 | 26 | 1 | UCCCUGGCUUGUCAGUUACAAGUA | TTTG | 694 |
| Human-G1-exon51 | | 1 | CAGAGUAACAGUCUGAGUAGGAGc | TTTA | 695 |
| Human-G2-exon51 | | 1 | uacuuuguuuagcaauacauggua | TTTC | 696 |
| Human-G3-exon51 | | -1 | uggcucaaauuguuacucuucaau | TTTA | 697 |
| mouse-Exon23-G1 | | 1 | CUUUCAAagaacuuugcagagccu | TTTG | 698 |
| mouse-Exon23-G2 | | 1 | guugaaGCCAUUUUGUUGCUCUUU | TTTG | 699 |
| mouse-Exon23-G3 | | 1 | guugaaGCCAUUUUAUUGCUCUUU | TTTG | 700 |
| mouse-Exon23-G4 | | -1 | uuuugagGCUCUGCAAAGUUCUUU | TTTC | 701 |
| mouse-Exon23-G5 | | -1 | aguuauuaaugcauagauauucag | TTTA | 702 |
| mouse-Exon23-G6 | | -1 | uauaauaugcccuguaauauaaua | TTTC | 703 |
| mouse-Exon23-G7 | | 1 | uaaaggccaaaccucggcuuaccU | TTTC | 704 |
| mouse-Exon23-G8 | | 1 | ucaauaucuuugaaggacucuggg | TTTA | 705 |

*In this table, upper case letters represent sgRNA nucleotides that align to the exon sequence of the gene. Lower case letters represent sgRNA nucleotides that align to the intron sequence of the gene.

TABLE 8
Genomic target sites for sgRNA in mouse Dmd
Exon 51

| | | | SEQ ID | |
|---|---|---|---|---|
| ID sgRNA | Strand | Target site | NO: | PAM |
| Ex51-SA1 | 3′ | AGAGTAACAGTCTGACTGG | 706 | CAG |
| Ex51-SD | 5′ | GAAATGATCATCAAACAGA | 707 | AGG |
| Ex51-SA-2 | 3′ | CACTAGAGTAACAGTCTGAC | 708 | TGG |

TABLE 9
gRNA sequences targeting mouse Dmd Exon 51

| | | | SEQ ID | |
|---|---|---|---|---|
| ID sgRNA | Strand | Target site | NO: | PAM |
| Ex51-SA1 | 3′ | CCAGUCAGACUGUUACUCU | 709 | CAG |
| Ex51-SD | 5′ | UCUGUUUGAUGAUCAUUUC | 710 | AGG |
| Ex51-SA-2 | 3′ | GUCAGACUGUUACUCUAGUG | 711 | TGG |

TABLE 10
Genomic target sequences for sgRNAs targeting
human Dmd Exon 51

| | | | SEQ ID | |
|---|---|---|---|---|
| ID sgRNA | Strand | Target site | NO: | PAM |
| Ex51-SA | 3 | AGAGTAACAGTCTGAGTAG | 712 | GAG |
| Ex51-SD | 5′ | GAGATGATCATCAAGCAGA | 713 | AGG |
| Ex51-SA-2 | 3′ | CACCAGAGTAACAGTCTGAG | 714 | TAG |

TABLE 11
sgRNA sequences targeting human Dmd Exon 51

| | | | SEQ ID | |
|---|---|---|---|---|
| ID sgRNA | Strand | Target site | NO: | PAM |
| Ex51-SA | 3′ | CUACUCAGACUGUUACUCU | 715 | GAG |
| Ex51-SD | 5′ | UCUGCUUGAUGAUCAUCUC | 716 | AGG |
| Ex51-SA-2 | 3′ | CUCAGACUGUUACUCUGGUG | 717 | TAG |

TABLE 12
Genomic target sequences for sgRNAs targeting
sites in various human Dmd Exons

| | | | SEQ | |
|---|---|---|---|---|
| | | | ID | |
| ID sgRNA | Strand | Target site | NO: | PAM |
| Exon51-#1 | 3′ | CAGAGTAACAGTCTGAGTAG | 947 | GAG |
| Exon51-#2 | 3′ | CACCAGAGTAACAGTCTGAG | 718 | TAG |
| Exon51-#3 | 3′ | TATTTTGGGTTTTTGCAAAA | 719 | AGG |
| Exon51-#4 | 3′ | AGTAGGAGCTAAAATATTTT | 720 | GGG |
| Exon51-#5 | 3′ | GAGTAGGAGCTAAAATATTT | 721 | TGG |
| Exon51-#6 | 3′ | ACCAGAGTAACAGTCTGAGT | 722 | AGG |
| Exon51-#7 | 5′ | TCCTACTCAGACTGTTACTC | 723 | TGG |
| Exon51-#8 | 5′ | TACTCTGGTGACACAACCTG | 724 | TGG |
| Exon51-#9 | 3′ | GCAGTTTCCTTAGTAACCAC | 725 | AGG |
| Exon51-#10 | 5′ | GACACAACCTGTGGTTACTA | 726 | AGG |
| Exon51-#11 | 3′ | TGTCACCAGAGTAACAGTCT | 727 | GAG |
| Exon51-#12 | 3′ | AGGTTGTGTCACCAGAGTAA | 728 | CAG |
| Exon51-#13 | 3′ | AACCACAGGTTGTGTCACCA | 729 | GAG |
| Exon51-#14 | 3′ | GTAACCACAGGTTGTGTCAC | 730 | CAG |
| Exon53-#1 | 5′ | ATTTATTTTTCCTTTTATTC | 731 | TAG |
| Exon53-#2 | 5′ | TTTCCTTTTATTCTAGTTGA | 732 | AAG |
| Exon53-#3 | 3′ | TGATTCTGAATTCTTTCAAC | 733 | TAG |
| Exon53-#4 | 3′ | AATTCTTTCAACTAGAATAA | 734 | AAG |
| Exon53-#6 | 5′ | TTATTCTAGTTGAAAGAATT | 735 | CAG |
| Exon53-#7 | 5′ | TAGTTGAAAGAATTCAGAAT | 736 | CAG |
| Exon53-#8 | 5′ | AATTCAGAATCAGTGGGATG | 737 | AAG |
| Exon53-#9 | 3′ | ATTCTTTCAACTAGAATAAA | 738 | AGG |
| Exon53-#10 | 5′ | TTGAAAGAATTCAGAATCAG | 739 | TGG |
| Exon53-#11 | 5′ | TGAAAGAATTCAGAATCAGT | 740 | GGG |
| Exon53-#12 | 3′ | ACTGTTGCCTCCGGTTCTGA | 741 | AGG |
| Exon44-#1 | 3′ | CAGATCTGTCAAATCGCCTG | 742 | CAG |
| Exon44-#2 | 3′ | AAAACGCCGCCATTTCTCAA | 743 | CAG |
| Exon44-#3 | 3′ | AGATCTGTCAAATCGCCTGC | 744 | AGG |
| Exon44-#4 | 3′ | TATGGATCAAGAAAAATAGA | 745 | TGG |
| Exon44-#5 | 3′ | CGCCTGCAGGTAAAAGCATA | 746 | TGG |
| Exon44-#6 | 5′ | ATCCATATGCTTTTACCTGC | 747 | AGG |
| Exon44-#8 | 5′ | TTGACAGATCTGTTGAGAAA | 748 | TGG |
| Exon44-#9 | 5′ | ACAGATCTGTTGAGAAATGG | 749 | CGG |
| Exon44-#11 | 5′ | GGCGATTTGACAGATCTGTT | 750 | GAG |
| Exon44-#13 | 5′ | GGCGTTTTCATTATGATATA | 751 | AAG |
| Exon44-#14 | 5′ | ATGATATAAAGATATTTAAT | 752 | CAG |
| Exon44-#15 | 5′ | GATATTTAATCAGTGGCTAA | 753 | CAG |
| Exon44-#16 | 5′ | ATTTAATCAGTGGCTAACAG | 754 | AAG |
| Exon44-#17 | 3′ | AGAAACTGTTCAGCTTCTGT | 755 | TAG |
| Exon43-#1 | 5′ | GTTTTAAAATTTTTATATTA | 756 | CAG |
| Exon43-#2 | 5′ | TTTTATATTACAGAATATAA | 757 | AAG |
| Exon43-#3 | 5′ | ATATTACAGAATATAAAAGA | 758 | TAG |
| Exon45-#1 | 3′ | GTTCCTGTAAGATACCAAAA | 759 | AGG |
| Exon45-#2 | 5′ | TTGCCTTTTTGGTATCTTAC | 760 | AGG |
| Exon45-#3 | 5′ | TGGTATCTTACAGGAACTCC | 761 | AGG |
| Exon45-#4 | 5′ | ATCTTACAGGAACTCCAGGA | 762 | TGG |
| Exon45-#5 | 3′ | GCCGCTGCCCAATGCCATCC | 763 | TGG |
| Exon45-#6 | 5′ | CAGGAACTCCAGGATGGCAT | 764 | TGG |
| Exon45-#7 | 5′ | AGGAACTCCAGGATGGCATT | 765 | GGG |
| Exon45-#8 | 5′ | TCCAGGATGGCATTGGGCAG | 766 | CGG |
| Exon45-#9 | 5′ | GTCAGAACATTGAATGCAAC | 767 | TGG |
| Exon45-#10 | 3′ | AGTTCCTGTAAGATACCAAA | 768 | AAG |
| Exon45-#11 | 3′ | TGCCATCCTGGAGTTCCTGT | 769 | AAG |
| Exon45-#12 | 5′ | TTGGTATCTTACAGGAACTC | 770 | CAG |
| Exon45-#13 | 3′ | CGCTGCCCAATGCCATCCTG | 771 | GAG |
| Exon45-#14 | 5′ | AACTCCAGGATGGCATTGGG | 772 | CAG |
| Exon45-#15 | 5′ | GGGCAGCGGCAAACTGTTGT | 773 | CAG |
| Exon52-#1 | 3′ | AGATCTGTCAAATCGCCTGC | 774 | AGG |
| Exon52-#2 | 3′ | AATCCTGCATTGTTGCCTGT | 775 | AAG |
| Exon52-#3 | 5′ | CGCTGAAGAACCCTGATACT | 776 | AAG |
| Exon52-#4 | 3′ | GAACAAATATCCCTTAGTAT | 777 | CAG |
| Exon52-#5 | 3′ | CTGTAAGAACAAATATCCCT | 778 | TAG |
| Exon52-#6 | 5′ | CTAAGGGATATTTGTTCTTA | 779 | CAG |
| Exon52-#8 | 5′ | TGTTCTTACAGGCAACAATG | 780 | CAG |
| Exon52-#9 | 5′ | CAACAATGCAGGATTTGGAA | 781 | CAG |
| Exon52-#10 | 5′ | ACAATGCAGGATTTGGAACA | 782 | GAG |
| Exon52-#11 | 5′ | ATTTGGAACAGAGGCGTCCC | 783 | CAG |
| Exon52-#12 | 5′ | ACAGAGGCGTCCCCAGTTGG | 784 | AAG |
| Exon2-#1 | 5′ | TATTTTTTTATTTTGCATTT | 785 | TAG |
| Exon2-#2 | 5′ | TTATTTTGCATTTTAGATGA | 786 | AAG |
| Exon2-#3 | 5′ | ATTTTGCATTTTAGATGAAA | 787 | GAG |
| Exon2-#4 | 5′ | TTGCATTTTAGATGAAAGAG | 788 | AAG |
| Exon2-#5 | 5′ | ATGAAAGAGAAGATGTTCAA | 789 | AAG |

TABLE 13
gRNA sequences for targeting sites in various
human Dmd Exons

| | | | SEQ | |
|---|---|---|---|---|
| | | | ID | |
| ID sgRNA | Strand | Target site | NO: | PAM |
| Exon51-#1 | 3′ | CUACUCAGACUGUUACUCUG | 790 | GAG |
| Exon51-#2 | 3′ | CUCAGACUGUUACUCUGGUG | 791 | TAG |
| Exon51-#3 | 3′ | UUUUGCAAAAACCCAAAAUA | 792 | AGG |
| Exon51-#4 | 3′ | AAAAUAUUUUAGCUCCUACU | 793 | GGG |
| Exon51-#5 | 3′ | AAAUAUUUUAGCUCCUACUC | 794 | TGG |
| Exon51-#6 | 3′ | ACUCAGACUGUUACUCUGGU | 795 | AGG |
| Exon51-#7 | 5′ | GAGUAACAGUCUGAGUAGGA | 796 | TGG |
| Exon51-#8 | 5′ | CAGGUUGUGUCACCAGAGUA | 797 | TGG |
| Exon51-#9 | 3′ | GUGGUUACUAAGGAAACUGC | 798 | AGG |
| Exon51-#10 | 5′ | UAGUAACCACAGGUUGUGUC | 799 | AGG |
| Exon51-#11 | 3′ | AGACUGUUACUCUGGUGACA | 800 | GAG |
| Exon51-#12 | 3′ | UUACUCUGGUGACACAACCU | 801 | CAG |
| Exon51-#13 | 3′ | UGGUGACACAACCUGUGGUU | 802 | GAG |
| Exon51-#14 | 3′ | GUGACACAACCUGUGGUUAC | 803 | CAG |
| Exon53-#1 | 5′ | GAAUAAAAGGAAAAAUAAAU | 804 | TAG |
| Exon53-#2 | 5′ | UCAACUAGAAUAAAAGGAAA | 805 | AAG |
| Exon53-#3 | 3′ | GUUGAAAGAAUUCAGAAUCA | 806 | TAG |
| Exon53-#4 | 3′ | UUAUUCUAGUUGAAAGAAUU | 807 | AAG |
| Exon53-#6 | 5′ | AAUUCUUUCAACUAGAAUAA | 808 | CAG |
| Exon53-#7 | 5′ | AUUCUGAAUUCUUUCAACUA | 809 | CAG |
| Exon53-#8 | 5′ | CAUCCCACUGAUUCUGAAUU | 810 | AAG |
| Exon53-#9 | 3′ | UUUAUUCUAGUUGAAAGAAU | 811 | AGG |
| Exon53-#10 | 5′ | CUGAUUCUGAAUUCUUUCAA | 812 | TGG |
| Exon53-#11 | 5′ | ACUGAUUCUGAAUUCUUUCA | 813 | GGG |
| Exon53-#12 | 3′ | UCAGAACCGGAGGCAACAGU | 814 | AGG |
| Exon44-#1 | 3′ | CAGGCGAUUUGACAGAUCUG | 815 | CAG |
| Exon44-#2 | 3′ | UUGAGAAAUGGCGGCGUUUU | 816 | CAG |
| Exon44-#3 | 3′ | GCAGGCGAUUUGACAGAUCU | 817 | AGG |
| Exon44-#4 | 3′ | UCUAUUUUUCUUGAUCCAUA | 818 | TGG |
| Exon44-#5 | 3′ | UAUGCUUUUACCUGCAGGCG | 819 | TGG |
| Exon44-#6 | 5′ | GCAGGUAAAAGCAUAUGGAU | 820 | AGG |
| Exon44-#8 | 5′ | UUUCUCAACAGAUCUGUCAA | 821 | TGG |
| Exon44-#9 | 5′ | CCAUUUCUCAACAGAUCUGU | 822 | CGG |
| Exon44-#11 | 5′ | AACAGAUCUGUCAAAUCGCC | 823 | GAG |
| Exon44-#13 | 5′ | UAUAUCAUAAUGAAAACGCC | 824 | AAG |
| Exon44-#14 | 5′ | AUUAAAUAUCUUUAUAUCAU | 825 | CAG |
| Exon44-#15 | 5′ | UUAGCCACUGAUUAAAUAUC | 826 | CAG |
| Exon44-#16 | 5′ | CUGUUAGCCACUGAUUAAAU | 827 | AAG |
| Exon44-#17 | 3′ | ACAGAAGCUGAACAGUUUCU | 828 | TAG |
| Exon43-#1 | 5′ | UAAUAUAAAAAUUUUAAAAC | 829 | CAG |
| Exon43-#2 | 5′ | UUAUAUUCUGUAAUAUAAAA | 830 | AAG |
| Exon43-#3 | 5′ | UCUUUUAUAUUCUGUAAUAU | 831 | TAG |
| Exon45-#1 | 3′ | UUUUGGUAUCUUACAGGAAC | 832 | AGG |
| Exon45-#2 | 5′ | GUAAGAUACCAAAAAGGCAA | 833 | AGG |
| Exon45-#3 | 5′ | GGAGUUCCUGUAAGAUACCA | 834 | AGG |
| Exon45-#4 | 5′ | UCCUGGAGUUCCUGUAAGAU | 835 | TGG |
| Exon45-#5 | 3′ | GGAUGGCAUUGGGCAGCGGC | 836 | TGG |
| Exon45-#6 | 5′ | AUGCCAUCCUGGAGUUCCUG | 837 | TGG |
| Exon45-#7 | 5′ | AAUGCCAUCCUGGAGUUCCU | 838 | GGG |
| Exon45-#8 | 5′ | CUGCCCAAUGCCAUCCUGGA | 839 | CGG |
| Exon45-#9 | 5′ | GUUGCAUUCAAUGUUCUGAC | 840 | TGG |
| Exon45-#10 | 3′ | UUUGGUAUCUUACAGGAACU | 841 | AAG |
| Exon45-#11 | 3′ | ACAGGAACUCCAGGAUGGCA | 842 | AAG |
| Exon45-#12 | 5′ | GAGUUCCUGUAAGAUACCAA | 843 | CAG |
| Exon45-#13 | 3′ | CAGGAUGGCAUUGGGCAGCG | 844 | GAG |
| Exon45-#14 | 5′ | CCCAAUGCCAUCCUGGAGUU | 845 | CAG |
| Exon45-#15 | 5′ | ACAACAGUUUGCCGCUGCCC | 846 | CAG |
| Exon52-#1 | 3′ | GCAGGCGAUUUGACAGAUCU | 847 | AGG |
| Exon52-#2 | 3′ | ACAGGCAACAAUGCAGGAUU | 848 | AAG |
| Exon52-#3 | 5′ | AGUAUCAGGGUUCUUCAGCG | 849 | AAG |
| Exon52-#4 | 3′ | AUACUAAGGGAUAUUUGUUC | 850 | CAG |
| Exon52-#5 | 3′ | AGGGAUAUUUGUUCUUACAG | 851 | TAG |
| Exon52-#6 | 5′ | UAAGAACAAAUAUCCCUUAG | 852 | CAG |
| Exon52-#8 | 5′ | CAUUGUUGCCUGUAAGAACA | 853 | CAG |
| Exon52-#9 | 5′ | UUCCAAAUCCUGCAUUGUUG | 854 | CAG |
| Exon52-#10 | 5′ | UGUUCCAAAUCCUGCAUUGU | 855 | GAG |
| Exon52-#11 | 5′ | GGGACGCCUCUGUUCCAAAU | 856 | CAG |
| Exon52-#12 | 5′ | CCAACUGGGGACGCCUCUGU | 857 | AAG |
| Exon2-#1 | 5′ | ACAGAGGCGUCCCCAGUUGG | 858 | TAG |
| Exon2-#2 | 5′ | UCAUCUAAAAUGCAAAAUAA | 859 | AAG |
| Exon2-#3 | 5′ | UUUCAUCUAAAAUGCAAAAU | 860 | GAG |
| Exon2-#4 | 5′ | CUCUUUCAUCUAAAAUGCAA | 861 | AAG |
| Exon2-#5 | 5′ | UUGAACAUCUUCUCUUUCAU | 862 | AAG |

TABLE 14
Genomic targeting sequence for sgRNAs targeting
dog Dmd Exon 51

| | | | SEQ ID | |
|---|---|---|---|---|
| ID sgRNA | Strand | Target site | NO: | PAM |
| Ex51-SA-2 | 3′ | CACCAGAGTAACAGTCTGAC | 863 | TGG |

TABLE 15
gRNA sequence for targeting dog Dmd Exon 51

| | | | SEQ ID | |
|---|---|---|---|---|
| ID sgRNA | Strand | Target site | NO: | PAM |
| Ex51-SA-2 | 3′ | GUCAGACUGUUACUCUGGUG | 864 | TGG |

TABLE 16
Exon 43 & 45 gRNA sequences

| sgRNA ID | Sequence (5′-3′) | SEQ ID NO. |
|---|---|---|
| Ex45-gRNA#3 | CGCTGCCCAATGCCATCCTG | 948 |
| Ex45-gRNA#4 | ATCTTACAGGAACTCCAGGA | 949 |
| Ex45-gRNA#5 | AGGAACTCCAGGATGGCATT | 950 |
| Ex45-gRNA#6 | CGCTGCCCAATGCCATCC | 951 |
| Ex43-gRNA#1 | GTTTTAAAATTTTTATATTA | 952 |
| Ex43-gRNA#2 | TTTTATATTACAGAATATAA | 953 |
| Ex43-gRNA#4 | TATGTGTTACCTACCCTTGT | 954 |
| Ex43-gRNA#6 | GTACAAGGACCGACAAGGGT | 955 |

TABLE 17
Exon 43 & 45 gRNA sequences

| sgRNA ID | Sequence (5′-3′) | SEQ ID NO. |
|---|---|---|
| Ex45-gRNA#3 | CAGGAUGGCAUUGGGCAGCG | 956 |
| Ex45-gRNA#4 | UCCUGGAGUUCCUGUAAGAU | 957 |
| Ex45-gRNA#5 | AAUGCCAUCCUGGAGUUCCU | 958 |
| Ex45-gRNA#6 | GGAUGGCAUUGGGCAGCG | 959 |
| Ex43-gRNA#1 | UAAUAUAAAAAUUUUAAAAC | 960 |
| Ex43-gRNA#2 | UUAUAUUCUGUAAUAUAAAA | 961 |
| Ex43-gRNA#4 | ACAAGGGUAGGUAACACAUA | 962 |
| Ex43-gRNA#6 | ACCCUUGUCGGUCCUUGUAC | 963 |
| Ex45-gRNA#3′ | CGCUGCCCAAUGCCAUCCUG | 964 |
| Ex45-gRNA#4′ | AUCUUACAGGAACUCCAGGA | 965 |
| Ex45-gRNA#5′ | AGGAACUCCAGGAUGGCAUU | 966 |
| Ex45-gRNA#6′ | CGCUGCCCAAUGCCAUCC | 967 |
| Ex43-gRNA#1′ | GUUUUAAAAUUUUUAUAUUA | 968 |
| Ex43-gRNA#2′ | UUUUAUAUUACAGAAUAUAA | 969 |
| Ex43-gRNA#4′ | UAUGUGUUACCUACCCUUGU | 970 |
| Ex43-gRNA#6′ | GUACAAGGACCGACAAGGGU | 971 |

TABLE 18
gRNA sequences

| Targeted | | | | | | | |
|---|---|---|---|---|---|---|---|
| gRNA | Guide | | | | SEQ ID | | SEQ ID |
| Exon | # | Strand | PAM | DNA sequence* | NO. | RNA sequence* | NO. |
| Human- | 4 | 1 | tttt | tctttttcttcttttttccttttt | 972 | ucuuuuucuucuuuuuuccuuuuu | 1305 |
| Exon 51 | | | | | | | |
| Human- | 5 | 1 | tttt | ctttttcttcttttttcctttttG | 973 | cuuuuucuucuuuuuuccuuuuuG | 1306 |
| Exon 51 | | | | | | | |
| Human- | 6 | 1 | tttc | tttttcttcttttttcctttttGC | 974 | uuuuucuucuuuuuuccuuuuuGC | 1307 |
| Exon 51 | | | | | | | |
| Human- | 7 | 1 | tttt | tcttcttttttcctttttGCAAAA | 975 | ucuucuuuuuuccuuuuuGCAAAA | 1308 |
| Exon 51 | | | | | | | |
| Human- | 8 | 1 | tttt | cttcttttttcctttttGCAAAAA | 976 | cuucuuuuuuccuuuuuGCAAAAA | 1309 |
| Exon 51 | | | | | | | |
| Human- | 9 | 1 | tttc | ttcttttttcctttttGCAAAAAC | 977 | uucuuuuuuccuuuuuGCAAAAAC | 1310 |
| Exon 51 | | | | | | | |
| Human- | 10 | 1 | tttt | ttcctttttGCAAAAACCCAAAAT | 978 | uuccuuuuuGCAAAAACCCAAAAU | 1311 |
| Exon 51 | | | | | | | |
| Human- | 11 | 1 | tttt | tcctttttGCAAAAACCCAAAATA | 979 | uccuuuuuGCAAAAACCCAAAAUA | 1312 |
| Exon 51 | | | | | | | |
| Human- | 12 | 1 | tttt | cctttttGCAAAAACCCAAAATAT | 980 | ccuuuuuGCAAAAACCCAAAAUAU | 1313 |
| Exon 51 | | | | | | | |
| Human- | 13 | 1 | tttc | ctttttGCAAAAACCCAAAATATT | 981 | cuuuuuGCAAAAACCCAAAAUAUU | 1314 |
| Exon 51 | | | | | | | |
| Human- | 14 | 1 | tttt | tGCAAAAACCCAAAATATTTTAGC | 982 | uGCAAAAACCCAAAAUAUUUUAGC | 1315 |
| Exon 51 | | | | | | | |
| Human- | 15 | 1 | tttt | GCAAAAACCCAAAATATTTTAGCT | 983 | GCAAAAACCCAAAAUAUUUUAGCU | 1316 |
| Exon 51 | | | | | | | |
| Human- | 16 | 1 | tttG | CAAAAACCCAAAATATTTTAGCTC | 984 | CAAAAACCCAAAAUAUUUUAGCUC | 1317 |
| Exon 51 | | | | | | | |
| Human- | 17 | 1 | TTTT | AGCTCCTACTCAGACTGTTACTCT | 985 | AGCUCCUACUCAGACUGUUACUCU | 1318 |
| Exon 51 | | | | | | | |
| Human- | 18 | 1 | TTTA | GCTCCTACTCAGACTGTTACTCTG | 986 | GCUCCUACUCAGACUGUUACUCUG | 1319 |
| Exon 51 | | | | | | | |
| Human- | 19 | -1 | TTTC | CTTAGTAACCACAGGTTGTGTCAC | 987 | CUUAGUAACCACAGGUUGUGUCAC | 1320 |
| Exon 51 | | | | | | | |
| Human- | 20 | -1 | TTTG | GAGATGGCAGTTTCCTTAGTAACC | 988 | GAGAUGGCAGUUUCCUUAGUAACC | 1321 |
| Exon 51 | | | | | | | |
| Human- | 21 | -1 | TTTC | TAGTTTGGAGATGGCAGTTTCCTT | 999 | UAGUUUGGAGAUGGCAGUUUCCUU | 1322 |
| Exon 51 | | | | | | | |
| Human- | 22 | -1 | TTTT | TTCTCATACCTTCTGCTTGATGAT | 1000 | UUCUCAUACCUUCUGCUUGAUGAU | 1323 |
| Exon 51 | | | | | | | |
| Human- | 23 | -1 | TTTA | TCATTTTTTCTCATACCTTCTGCT | 1001 | UCAUUUUUUCUCAUACCUUCUGCU | 1324 |
| Exon 51 | | | | | | | |
| Human- | 24 | -1 | TTTT | ATCATTTTTTCTCATACCTTCTGC | 1002 | AUCAUUUUUUCUCAUACCUUCUGC | 1325 |
| Exon 51 | | | | | | | |
| Human- | 25 | -1 | TTTA | AAGAAAAACTTCTGCCAACTTTTA | 1003 | AAGAAAAACUUCUGCCAACUUUUA | 1326 |
| Exon 51 | | | | | | | |
| Human- | 26 | -1 | TTTT | AAAGAAAAACTTCTGCCAACTTTT | 1004 | AAAGAAAAACUUCUGCCAACUUUU | 1327 |
| Exon 51 | | | | | | | |
| Human- | 27 | 1 | TTTT | TCTTTAAAATGAAGATTTTCCACC | 1005 | UCUUUAAAAUGAAGAUUUUCCACC | 1328 |
| Exon 51 | | | | | | | |
| Human- | 28 | 1 | TTTT | CTTTAAAATGAAGATTTTCCACCA | 1006 | CUUUAAAAUGAAGAUUUUCCACCA | 1329 |
| Exon 51 | | | | | | | |
| Human- | 29 | 1 | TTTC | TTTAAAATGAAGATTTTCCACCAA | 1007 | UUUAAAAUGAAGAUUUUCCACCAA | 1330 |
| Exon 51 | | | | | | | |
| Human- | 30 | 1 | TTTA | AAATGAAGATTTTCCACCAATCAC | 1008 | AAAUGAAGAUUUUCCACCAAUCAC | 1331 |
| Exon 51 | | | | | | | |
| Human- | 31 | 1 | TTTT | CCACCAATCACTTTACTCTCCTAG | 1009 | CCACCAAUCACUUUACUCUCCUAG | 1332 |
| Exon 51 | | | | | | | |
| Human- | 32 | 1 | TTTC | CACCAATCACTTTACTCTCCTAGA | 1010 | CACCAAUCACUUUACUCUCCUAGA | 1333 |
| Exon 51 | | | | | | | |
| Human- | 33 | 1 | TTTA | CTCTCCTAGACCATTTCCCACCAG | 1011 | CUCUCCUAGACCAUUUCCCACCAG | 1334 |
| Exon 51 | | | | | | | |
| Human- | 1 | -1 | tttg | agaaaagattaaacagtgtgctac | 1012 | agaaaagauuaaacagugugcuac | 1335 |
| Exon 45 | | | | | | | |
| Human- | 2 | -1 | TTTa | tttgagaaaagattaaacagtgtg | 1013 | uuugagaaaagauuaaacagugug | 1336 |
| Exon 45 | | | | | | | |
| Human- | 3 | -1 | TTTT | atttgagaaaagattaaacagtgt | 1014 | auuugagaaaagauuaaacagugu | 1337 |
| Exon 45 | | | | | | | |
| Human- | 4 | -1 | TTTT | Tatttgagaaaagattaaacagtg | 1015 | Uauuugagaaaagauuaaacagug | 1338 |
| Exon 45 | | | | | | | |
| Human- | 5 | 1 | ttta | atcttttctcaaatAAAAAGACAT | 1016 | aucuuuucucaaauAAAAAGACAU | 1339 |
| Exon 45 | | | | | | | |
| Human- | 6 | 1 | tttt | ctcaaatAAAAAGACATGGGGCTT | 1017 | cucaaauAAAAAGACAUGGGGCUU | 1340 |
| Exon 45 | | | | | | | |
| Human- | 7 | 1 | tttc | tcaaatAAAAAGACATGGGGCTTC | 1018 | ucaaauAAAAAGACAUGGGGCUUC | 1341 |
| Exon 45 | | | | | | | |
| Human- | 8 | 1 | TTTT | TGTTTTGCCTTTTTGGTATCTTAC | 1019 | UGUUUUGCCUUUUUGGUAUCUUAC | 1342 |
| Exon 45 | | | | | | | |
| Human- | 9 | 1 | TTTT | GTTTTGCCTTTTTGGTATCTTACA | 1020 | GUUUUGCCUUUUUGGUAUCUUACA | 1343 |
| Exon 45 | | | | | | | |
| Human- | 10 | 1 | TTTG | TTTTGCCTTTTTGGTATCTTACAG | 1021 | UUUUGCCUUUUUGGUAUCUUACAG | 1344 |
| Exon 45 | | | | | | | |
| Human- | 11 | 1 | TTTT | GCCTTTTTGGTATCTTACAGGAAC | 1022 | GCCUUUUUGGUAUCUUACAGGAAC | 1345 |
| Exon 45 | | | | | | | |
| Human- | 12 | 1 | TTTG | CCTTTTTGGTATCTTACAGGAACT | 1023 | CCUUUUUGGUAUCUUACAGGAACU | 1346 |
| Exon 45 | | | | | | | |
| Human- | 13 | 1 | TTTT | TGGTATCTTACAGGAACTCCAGGA | 1024 | UGGUAUCUUACAGGAACUCCAGGA | 1347 |
| Exon 45 | | | | | | | |
| Human- | 14 | 1 | TTTT | GGTATCTTACAGGAACTCCAGGAT | 1025 | GGUAUCUUACAGGAACUCCAGGAU | 1348 |
| Exon 45 | | | | | | | |
| Human- | 15 | -1 | TTTG | AGGATTGCTGAATTATTTCTTCCC | 1026 | AGGAUUGCUGAAUUAUUUCUUCCC | 1349 |
| Exon 45 | | | | | | | |
| Human- | 16 | -1 | TTTT | GAGGATTGCTGAATTATTTCTTCC | 1027 | GAGGAUUGCUGAAUUAUUUCUUCC | 1350 |
| Exon 45 | | | | | | | |
| Human- | 17 | -1 | TTTT | TGAGGATTGCTGAATTATTTCTTC | 1028 | UGAGGAUUGCUGAAUUAUUUCUUC | 1351 |
| Exon 45 | | | | | | | |
| Human- | 18 | -1 | TTTC | CTGTAGAATACTGGCATCTGTTTT | 1029 | CUGUAGAAUACUGGCAUCUGUUUU | 1352 |
| Exon 45 | | | | | | | |
| Human- | 19 | -1 | TTTT | CCTGTAGAATACTGGCATCTGTTT | 1030 | CCUGUAGAAUACUGGCAUCUGUUU | 1353 |
| Exon 45 | | | | | | | |
| Human- | 20 | -1 | TTTT | TCCTGTAGAATACTGGCATCTGTT | 1031 | UCCUGUAGAAUACUGGCAUCUGUU | 1354 |
| Exon 45 | | | | | | | |
| Human- | 21 | -1 | TTTG | CAGACCTCCTGCCACCGCAGATTC | 1032 | CAGACCUCCUGCCACCGCAGAUUC | 1355 |
| Exon 45 | | | | | | | |
| Human- | 22 | -1 | TTTC | TGTCTGACAGCTGTTTGCAGACCT | 1033 | UGUCUGACAGCUGUUUGCAGACCU | 1356 |
| Exon 45 | | | | | | | |
| Human- | 23 | -1 | TTTT | CTGTCTGACAGCTGTTTGCAGACC | 1034 | CUGUCUGACAGCUGUUUGCAGACC | 1357 |
| Exon 45 | | | | | | | |
| Human- | 24 | -1 | TTTT | TCTGTCTGACAGCTGTTTGCAGAC | 1035 | UCUGUCUGACAGCUGUUUGCAGAC | 1358 |
| Exon 45 | | | | | | | |
| Human- | 25 | -1 | TTTT | TTCTGTCTGACAGCTGTTTGCAGA | 1036 | UUCUGUCUGACAGCUGUUUGCAGA | 1359 |
| Exon 45 | | | | | | | |
| Human- | 26 | -1 | TTTC | ATTCCTATTAGATCTGTCGCCCTA | 1037 | AUUCCUAUUAGAUCUGUCGCCCUA | 1360 |
| Exon 45 | | | | | | | |
| Human- | 27 | -1 | TTTT | CATTCCTATTAGATCTGTCGCCCT | 1038 | CAUUCCUAUUAGAUCUGUCGCCCU | 1361 |
| Exon 45 | | | | | | | |
| Human- | 28 | 1 | TTTT | AGCAGACTTTTTAAGCTTTCTTTA | 1039 | AGCAGACUUUUUAAGCUUUCUUUA | 1362 |
| Exon 45 | | | | | | | |
| Human- | 29 | 1 | TTTA | GCAGACTTTTTAAGCTTTCTTTAG | 1040 | GCAGACUUUUUAAGCUUUCUUUAG | 1363 |
| Exon 45 | | | | | | | |
| Human- | 30 | 1 | TTTT | TAAGCTTTCTTTAGAAGAATATTT | 1041 | UAAGCUUUCUUUAGAAGAAUAUUU | 1364 |
| Exon 45 | | | | | | | |
| Human- | 31 | 1 | TTTT | AAGCTTTCTTTAGAAGAATATTTC | 1042 | AAGCUUUCUUUAGAAGAAUAUUUC | 1365 |
| Exon 45 | | | | | | | |
| Human- | 32 | 1 | TTTA | AGCTTTCTTTAGAAGAATATTTCA | 1043 | AGCUUUCUUUAGAAGAAUAUUUCA | 1366 |
| Exon 45 | | | | | | | |
| Human- | 33 | 1 | TTTC | TTTAGAAGAATATTTCATGAGAGA | 1044 | UUUAGAAGAAUAUUUCAUGAGAGA | 1367 |
| Exon 45 | | | | | | | |
| Human- | 34 | 1 | TTTA | GAAGAATATTTCATGAGAGATTAT | 1045 | GAAGAAUAUUUCAUGAGAGAUUAU | 1368 |
| Exon 45 | | | | | | | |
| Human- | 1 | 1 | TTTG | TCAGTATAACCAAAAAATATACGC | 1046 | UCAGUAUAACCAAAAAAUAUACGC | 1369 |
| Exon 44 | | | | | | | |
| Human- | 2 | 1 | tttt | acataatccatctatttttcttga | 1047 | acauaauccaucuauuuuucuuga | 1370 |
| Exon 44 | | | | | | | |
| Human- | 3 | 1 | ttta | cataatccatctatttttcttgat | 1048 | cauaauccaucuauuuuucuugau | 1371 |
| Exon 44 | | | | | | | |
| Human- | 4 | 1 | tttt | tcttgatccatatgcttttACCTG | 1049 | ucuugauccauaugcuuuuACCUG | 1372 |
| Exon 44 | | | | | | | |
| Human- | 5 | 1 | tttt | cttgatccatatgcttttACCTGC | 1050 | cuugauccauaugcuuuuACCUGC | 1373 |
| Exon 44 | | | | | | | |
| Human- | 6 | 1 | tttc | ttgatccatatgcttttACCTGCA | 1051 | uugauccauaugcuuuuACCUGCA | 1374 |
| Exon 44 | | | | | | | |
| Human- | 7 | -1 | TTTC | TCAACAGATCTGTCAAATCGCCTG | 1052 | UCAACAGAUCUGUCAAAUCGCCUG | 1375 |
| Exon 44 | | | | | | | |
| Human- | 8 | 1 | tttt | ACCTGCAGGCGATTTGACAGATCT | 1053 | ACCUGCAGGCGAUUUGACAGAUCU | 1376 |
| Exon 44 | | | | | | | |
| Human- | 9 | 1 | tttA | CCTGCAGGCGATTTGACAGATCTG | 1054 | CCUGCAGGCGAUUUGACAGAUCUG | 1377 |
| Exon 44 | | | | | | | |
| Human- | 10 | 1 | TTTG | ACAGATCTGTTGAGAAATGGCGGC | 1055 | ACAGAUCUGUUGAGAAAUGGCGGC | 1378 |
| Exon 44 | | | | | | | |
| Human- | 11 | -1 | TTTA | TATCATAATGAAAACGCCGCCATT | 1056 | UAUCAUAAUGAAAACGCCGCCAUU | 1379 |
| Exon 44 | | | | | | | |
| Human- | 12 | 1 | TTTT | CATTATGATATAAAGATATTTAAT | 1057 | CAUUAUGAUAUAAAGAUAUUUAAU | 1380 |
| Exon 44 | | | | | | | |
| Human- | 13 | -1 | TTTG | TATTTAGCATGTTCCCAATTCTCA | 1058 | UAUUUAGCAUGUUCCCAAUUCUCA | 1381 |
| Exon 44 | | | | | | | |
| Human- | 14 | -1 | TTTC | GAAAAAACAAATCAAAGACTTACC | 1059 | GAAAAAACAAAUCAAAGACUUACC | 1382 |
| Exon 44 | | | | | | | |
| Human- | 15 | 1 | TTTG | ATTTGTTTTTTCGAAATTGTATTT | 1060 | AUUUGUUUUUUCGAAAUUGUAUUU | 1383 |
| Exon 44 | | | | | | | |
| Human- | 16 | 1 | TTTG | TTTTTTCGAAATTGTATTTATCTT | 1061 | UUUUUUCGAAAUUGUAUUUAUCUU | 1384 |
| Exon 44 | | | | | | | |
| Human- | 17 | 1 | TTTT | TTCGAAATTGTATTTATCTTCAGC | 1062 | UUCGAAAUUGUAUUUAUCUUCAGC | 1385 |
| Exon 44 | | | | | | | |
| Human- | 18 | 1 | TTTT | TCGAAATTGTATTTATCTTCAGCA | 1063 | UCGAAAUUGUAUUUAUCUUCAGCA | 1386 |
| Exon 44 | | | | | | | |
| Human- | 19 | 1 | TTTT | CGAAATTGTATTTATCTTCAGCAC | 1064 | CGAAAUUGUAUUUAUCUUCAGCAC | 1387 |
| Exon 44 | | | | | | | |
| Human- | 20 | 1 | TTTC | GAAATTGTATTTATCTTCAGCACA | 1065 | GAAAUUGUAUUUAUCUUCAGCACA | 1388 |
| Exon 44 | | | | | | | |
| Human- | 21 | -1 | TTTA | AGAAGTTAAAGAGTCCAGATGTGC | 1066 | AGAAGUUAAAGAGUCCAGAUGUGC | 1389 |
| Exon 44 | | | | | | | |
| Human- | 22 | 1 | TTTA | TCTTCAGCACATCTGGACTCTTTA | 1067 | UCUUCAGCACAUCUGGACUCUUUA | 1390 |
| Exon 44 | | | | | | | |
| Human- | 23 | -1 | TTTC | CATCACCCTTCAGAACCTGATCTT | 1068 | CAUCACCCUUCAGAACCUGAUCUU | 1391 |
| Exon 44 | | | | | | | |
| Human- | 24 | 1 | TTTA | ACTTCTTAAAGATCAGGTTCTGAA | 1069 | ACUUCUUAAAGAUCAGGUUCUGAA | 1392 |
| Exon 44 | | | | | | | |
| Human- | 25 | 1 | TTTT | GACTGTTGTTGTCATCATTATATT | 1070 | GACUGUUGUUGUCAUCAUUAUAUU | 1393 |
| Exon 44 | | | | | | | |
| Human- | 26 | 1 | TTTG | ACTGTTGTTGTCATCATTATATTA | 1071 | ACUGUUGUUGUCAUCAUUAUAUUA | 1394 |
| Exon 44 | | | | | | | |
| Human- | 1 | -1 | TTTC | AACTAGAATAAAAGGAAAAATAAA | 1072 | AACUAGAAUAAAAGGAAAAAUAAA | 1395 |
| Exon 53 | | | | | | | |
| Human- | 2 | 1 | TTTA | CTACTATATATTTATTTTTCCTTT | 1073 | CUACUAUAUAUUUAUUUUUCCUUU | 1396 |
| Exon 53 | | | | | | | |
| Human- | 3 | 1 | TTTA | TTTTTCCTTTTATTCTAGTTGAAA | 1074 | UUUUUCCUUUUAUUCUAGUUGAAA | 1397 |
| Exon 53 | | | | | | | |
| Human- | 4 | 1 | TTTT | TCCTTTTATTCTAGTTGAAAGAAT | 1075 | UCCUUUUAUUCUAGUUGAAAGAAU | 1398 |
| Exon 53 | | | | | | | |
| Human- | 5 | 1 | TTTT | CCTTTTATTCTAGTTGAAAGAATT | 1076 | CCUUUUAUUCUAGUUGAAAGAAUU | 1399 |
| Exon 53 | | | | | | | |
| Human- | 6 | 1 | TTTC | CTTTTATTCTAGTTGAAAGAATTC | 1077 | CUUUUAUUCUAGUUGAAAGAAUUC | 1400 |
| Exon 53 | | | | | | | |
| Human- | 7 | 1 | TTTT | ATTCTAGTTGAAAGAATTCAGAAT | 1078 | AUUCUAGUUGAAAGAAUUCAGAAU | 1401 |
| Exon 53 | | | | | | | |
| Human- | 8 | 1 | TTTA | TTCTAGTTGAAAGAATTCAGAATC | 1079 | UUCUAGUUGAAAGAAUUCAGAAUC | 1402 |
| Exon 53 | | | | | | | |
| Human- | 9 | -1 | TTTC | ATTCAACTGTTGCCTCCGGTTCTG | 1080 | AUUCAACUGUUGCCUCCGGUUCUG | 1403 |
| Exon 53 | | | | | | | |
| Human- | 10 | -1 | TTTA | ACATTTCATTCAACTGTTGCCTCC | 1081 | ACAUUUCAUUCAACUGUUGCCUCC | 1404 |
| Exon 53 | | | | | | | |
| Human- | 11 | -1 | TTTT | CTTTTGGATTGCATCTACTGTATA | 1082 | CUUUUGGAUUGCAUCUACUGUAUA | 1405 |
| Exon 53 | | | | | | | |
| Human- | 12 | -1 | TTTC | TGTGATTTTCTTTTGGATTGCATC | 1083 | UGUGAUUUUCUUUUGGAUUGCAUC | 1406 |
| Exon 53 | | | | | | | |
| Human- | 13 | -1 | TTTG | ATACTAACCTTGGTTTCTGTGATT | 1084 | AUACUAACCUUGGUUUCUGUGAUU | 1407 |
| Exon 53 | | | | | | | |
| Human- | 14 | -1 | TTTA | AAAAGGTATCTTTGATACTAACCT | 1085 | AAAAGGUAUCUUUGAUACUAACCU | 1408 |
| Exon 53 | | | | | | | |
| Human- | 15 | -1 | TTTT | AAAAAGGTATCTTTGATACTAACC | 1086 | AAAAAGGUAUCUUUGAUACUAACC | 1409 |
| Exon 53 | | | | | | | |
| Human- | 16 | -1 | TTTA | TTTTAAAAAGGTATCTTTGATACT | 1087 | UUUUAAAAAGGUAUCUUUGAUACU | 1410 |
| Exon 53 | | | | | | | |
| Human- | 17 | -1 | TTTT | ATTTTAAAAAGGTATCTTTGATAC | 1088 | AUUUUAAAAAGGUAUCUUUGAUAC | 1411 |
| Exon 53 | | | | | | | |
| Human- | 1 | -1 | TTTG | TTAATGCAAACTGGGACACAAACA | 1089 | UUAAUGCAAACUGGGACACAAACA | 1412 |
| Exon 46 | | | | | | | |
| Human- | 2 | 1 | TTTT | TAAATTGCCATGTTTGTGTCCCAG | 1090 | UAAAUUGCCAUGUUUGUGUCCCAG | 1413 |
| Exon 46 | | | | | | | |
| Human- | 3 | 1 | TTTT | AAATTGCCATGTTTGTGTCCCAGT | 1091 | AAAUUGCCAUGUUUGUGUCCCAGU | 1414 |
| Exon 46 | | | | | | | |
| Human- | 4 | 1 | TTTA | AATTGCCATGTTTGTGTCCCAGTT | 1092 | AAUUGCCAUGUUUGUGUCCCAGUU | 1415 |
| Exon 46 | | | | | | | |
| Human- | 5 | 1 | TTTG | TGTCCCAGTTTGCATTAACAAATA | 1093 | UGUCCCAGUUUGCAUUAACAAAUA | 1416 |
| Exon 46 | | | | | | | |
| Human- | 6 | -1 | tttC | CAACATAGTTCTCAAACTATTTGT | 1094 | CAACAUAGUUCUCAAACUAUUUGU | 1417 |
| Exon 46 | | | | | | | |
| Human- | 7 | -1 | tttt | CCAACATAGTTCTCAAACTATTTG | 1095 | CCAACAUAGUUCUCAAACUAUUUG | 1418 |
| Exon 46 | | | | | | | |
| Human- | 8 | -1 | tttt | tCCAACATAGTTCTCAAACTATTT | 1096 | uCCAACAUAGUUCUCAAACUAUUU | 1419 |
| Exon 46 | | | | | | | |
| Human- | 9 | -1 | tttt | tttCCAACATAGTTCTCAAACTAT | 1097 | uuuCCAACAUAGUUCUCAAACUAU | 1420 |
| Exon 46 | | | | | | | |
| Human- | 10 | -1 | tttt | ttttCCAACATAGTTCTCAAACTA | 1098 | uuuuCCAACAUAGUUCUCAAACUA | 1421 |
| Exon 46 | | | | | | | |
| Human- | 11 | -1 | tttt | tttttCCAACATAGTTCTCAAACT | 1099 | uuuuuCCAACAUAGUUCUCAAACU | 1422 |
| Exon 46 | | | | | | | |
| Human- | 12 | 1 | TTTG | CATTAACAAATAGTTTGAGAACTA | 1100 | CAUUAACAAAUAGUUUGAGAACUA | 1423 |
| Exon 46 | | | | | | | |
| Human- | 13 | 1 | TTTG | AGAACTATGTTGGaaaaaaaaaTA | 1101 | AGAACUAUGUUGGaaaaaaaaaUA | 1424 |
| Exon 46 | | | | | | | |
| Human- | 14 | -1 | TTTT | GTTCTTCTAGCCTGGAGAAAGAAG | 1102 | GUUCUUCUAGCCUGGAGAAAGAAG | 1425 |
| Exon 46 | | | | | | | |
| Human- | 15 | 1 | TTTT | ATTCTTCTTTCTCCAGGCTAGAAG | 1103 | AUUCUUCUUUCUCCAGGCUAGAAG | 1426 |
| Exon 46 | | | | | | | |
| Human- | 16 | 1 | TTTA | TTCTTCTTTCTCCAGGCTAGAAGA | 1104 | UUCUUCUUUCUCCAGGCUAGAAGA | 1427 |
| Exon 46 | | | | | | | |
| Human- | 17 | 1 | TTTC | TCCAGGCTAGAAGAACAAAAGAAT | 1105 | UCCAGGCUAGAAGAACAAAAGAAU | 1428 |
| Exon 46 | | | | | | | |
| Human- | 18 | -1 | TTTG | AAATTCTGACAAGATATTCTTTTG | 1106 | AAAUUCUGACAAGAUAUUCUUUUG | 1429 |
| Exon 46 | | | | | | | |
| Human- | 19 | -1 | TTTT | CTTTTAGTTGCTGCTCTTTTCCAG | 1107 | CUUUUAGUUGCUGCUCUUUUCCAG | 1430 |
| Exon 46 | | | | | | | |
| Human- | 20 | -1 | TTTG | AGAAAATAAAATTACCTTGACTTG | 1108 | AGAAAAUAAAAUUACCUUGACUUG | 1431 |
| Exon 46 | | | | | | | |
| Human- | 21 | -1 | TTTA | TGCAAGCAGGCCCTGGGGGATTTG | 1109 | UGCAAGCAGGCCCUGGGGGAUUUG | 1432 |
| Exon 46 | | | | | | | |
| Human- | 22 | 1 | TTTT | ATTTTCTCAAATCCCCCAGGGCCT | 1110 | AUUUUCUCAAAUCCCCCAGGGCCU | 1433 |
| Exon 46 | | | | | | | |
| Human- | 23 | 1 | TTTA | TTTTCTCAAATCCCCCAGGGCCTG | 1111 | UUUUCUCAAAUCCCCCAGGGCCUG | 1434 |
| Exon 46 | | | | | | | |
| Human- | 24 | 1 | TTTT | CTCAAATCCCCCAGGGCCTGCTTG | 1112 | CUCAAAUCCCCCAGGGCCUGCUUG | 1435 |
| Exon 46 | | | | | | | |
| Human- | 25 | 1 | TTTC | TCAAATCCCCCAGGGCCTGCTTGC | 1113 | UCAAAUCCCCCAGGGCCUGCUUGC | 1436 |
| Exon 46 | | | | | | | |
| Human- | 26 | 1 | TTTT | TTAATTCAATCATTGGTTTTCTGC | 1114 | UUAAUUCAAUCAUUGGUUUUCUGC | 1437 |
| Exon 46 | | | | | | | |
| Human- | 27 | 1 | TTTT | TAATTCAATCATTGGTTTTCTGCC | 1115 | UAAUUCAAUCAUUGGUUUUCUGCC | 1438 |
| Exon 46 | | | | | | | |
| Human- | 28 | 1 | TTTT | AATTCAATCATTGGTTTTCTGCCC | 1116 | AAUUCAAUCAUUGGUUUUCUGCCC | 1439 |
| Exon 46 | | | | | | | |
| Human- | 29 | 1 | TTTA | ATTCAATCATTGGTTTTCTGCCCA | 1117 | AUUCAAUCAUUGGUUUUCUGCCCA | 1440 |
| Exon 46 | | | | | | | |
| Human- | 30 | -1 | TTTA | GCAAGGAACTATGAATAACCTAAT | 1118 | GCAAGGAACUAUGAAUAACCUAAU | 1441 |
| Exon 46 | | | | | | | |
| Human- | 31 | 1 | TTTT | CTGCCCATTAGGTTATTCATAGTT | 1119 | CUGCCCAUUAGGUUAUUCAUAGUU | 1442 |
| Exon 46 | | | | | | | |
| Human- | 32 | 1 | TTTC | TGCCCATTAGGTTATTCATAGTTC | 1120 | UGCCCAUUAGGUUAUUCAUAGUUC | 1443 |
| Exon 46 | | | | | | | |
| Human- | 1 | -1 | TTTA | TAGAAAACAATTTAACAGGAAATA | 1121 | UAGAAAACAAUUUAACAGGAAAUA | 1444 |
| Exon 52 | | | | | | | |
| Human- | 2 | 1 | TTTC | CTGTTAAATTGTTTTCTATAAACC | 1122 | CUGUUAAAUUGUUUUCUAUAAACC | 1445 |
| Exon 52 | | | | | | | |
| Human- | 3 | -1 | TTTA | GAAATAAAAAAGATGTTACTGTAT | 1123 | GAAAUAAAAAAGAUGUUACUGUAU | 1446 |
| Exon 52 | | | | | | | |
| Human- | 4 | -1 | TTTT | AGAAATAAAAAAGATGTTACTGTA | 1124 | AGAAAUAAAAAAGAUGUUACUGUA | 1447 |
| Exon 52 | | | | | | | |
| Human- | 5 | 1 | TTTT | CTATAAACCCTTATACAGTAACAT | 1125 | CUAUAAACCCUUAUACAGUAACAU | 1448 |
| Exon 52 | | | | | | | |
| Human- | 6 | 1 | TTTC | TATAAACCCTTATACAGTAACATC | 1126 | UAUAAACCCUUAUACAGUAACAUC | 1449 |
| Exon 52 | | | | | | | |
| Human- | 7 | 1 | TTTT | TTATTTCTAAAAGTGTTTTGGCTG | 1127 | UUAUUUCUAAAAGUGUUUUGGCUG | 1450 |
| Exon 52 | | | | | | | |
| Human- | 8 | 1 | TTTT | TATTTCTAAAAGTGTTTTGGCTGG | 1128 | UAUUUCUAAAAGUGUUUUGGCUGG | 1451 |
| Exon 52 | | | | | | | |
| Human- | 9 | 1 | TTTT | ATTTCTAAAAGTGTTTTGGCTGGT | 1129 | AUUUCUAAAAGUGUUUUGGCUGGU | 1452 |
| Exon 52 | | | | | | | |
| Human- | 10 | 1 | TTTA | TTTCTAAAAGTGTTTTGGCTGGTC | 1130 | UUUCUAAAAGUGUUUUGGCUGGUC | 1453 |
| Exon 52 | | | | | | | |
| Human- | 11 | 1 | TTTC | TAAAAGTGTTTTGGCTGGTCTCAC | 1131 | UAAAAGUGUUUUGGCUGGUCUCAC | 1454 |
| Exon 52 | | | | | | | |
| Human- | 12 | -1 | TTTA | CATAATACAAAGTAAAGTACAATT | 1132 | CAUAAUACAAAGUAAAGUACAAUU | 1455 |
| Exon 52 | | | | | | | |
| Human- | 13 | -1 | TTTT | ACATAATACAAAGTAAAGTACAAT | 1133 | ACAUAAUACAAAGUAAAGUACAAU | 1456 |
| Exon 52 | | | | | | | |
| Human- | 14 | 1 | TTTT | GGCTGGTCTCACAATTGTACTTTA | 1134 | GGCUGGUCUCACAAUUGUACUUUA | 1457 |
| Exon 52 | | | | | | | |
| Human- | 15 | 1 | TTTG | GCTGGTCTCACAATTGTACTTTAC | 1135 | GCUGGUCUCACAAUUGUACUUUAC | 1458 |
| Exon 52 | | | | | | | |
| Human- | 16 | 1 | TTTA | CTTTGTATTATGTAAAAGGAATAC | 1136 | CUUUGUAUUAUGUAAAAGGAAUAC | 1459 |
| Exon 52 | | | | | | | |
| Human- | 17 | 1 | TTTG | TATTATGTAAAAGGAATACACAAC | 1137 | UAUUAUGUAAAAGGAAUACACAAC | 1460 |
| Exon 52 | | | | | | | |
| Human- | 18 | 1 | TTTG | TTCTTACAGGCAACAATGCAGGAT | 1138 | UUCUUACAGGCAACAAUGCAGGAU | 1461 |
| Exon 52 | | | | | | | |
| Human- | 19 | 1 | TTTG | GAACAGAGGCGTCCCCAGTTGGAA | 1139 | GAACAGAGGCGUCCCCAGUUGGAA | 1462 |
| Exon 52 | | | | | | | |
| Human- | 20 | -1 | TTTG | GGCAGCGGTAATGAGTTCTTCCAA | 1140 | GGCAGCGGUAAUGAGUUCUUCCAA | 1463 |
| Exon 52 | | | | | | | |
| Human- | 21 | -1 | TTTT | TCAAATTTTGGGCAGCGGTAATGA | 1141 | UCAAAUUUUGGGCAGCGGUAAUGA | 1464 |
| Exon 52 | | | | | | | |
| Human- | 22 | 1 | TTTG | AAAAACAAGACCAGCAATCAAGAG | 1142 | AAAAACAAGACCAGCAAUCAAGAG | 1465 |
| Exon 52 | | | | | | | |
| Human- | 23 | -1 | TTTG | TGTGTCCCATGCTTGTTAAAAAAC | 1143 | UGUGUCCCAUGCUUGUUAAAAAAC | 1466 |
| Exon 52 | | | | | | | |
| Human- | 24 | 1 | TTTT | TTAACAAGCATGGGACACACAAAG | 1144 | UUAACAAGCAUGGGACACACAAAG | 1467 |
| Exon 52 | | | | | | | |
| Human- | 25 | 1 | TTTT | TAACAAGCATGGGACACACAAAGC | 1145 | UAACAAGCAUGGGACACACAAAGC | 1468 |
| Exon 52 | | | | | | | |
| Human- | 26 | 1 | TTTT | AACAAGCATGGGACACACAAAGCA | 1146 | AACAAGCAUGGGACACACAAAGCA | 1469 |
| Exon 52 | | | | | | | |
| Human- | 27 | 1 | TTTA | ACAAGCATGGGACACACAAAGCAA | 1147 | ACAAGCAUGGGACACACAAAGCAA | 1470 |
| Exon 52 | | | | | | | |
| Human- | 28 | -1 | TTTA | TTGAAACTTGTCATGCATCTTGCT | 1148 | UUGAAACUUGUCAUGCAUCUUGCU | 1471 |
| Exon 52 | | | | | | | |
| Human- | 29 | -1 | TTTT | ATTGAAACTTGTCATGCATCTTGC | 1149 | AUUGAAACUUGUCAUGCAUCUUGC | 1472 |
| Exon 52 | | | | | | | |
| Human- | 30 | -1 | TTTT | TATTGAAACTTGTCATGCATCTTG | 1150 | UAUUGAAACUUGUCAUGCAUCUUG | 1473 |
| Exon 52 | | | | | | | |
| Human- | 31 | 1 | TTTC | AATAAAAACTTAAGTTCATATATC | 1151 | AAUAAAAACUUAAGUUCAUAUAUC | 1474 |
| Exon 52 | | | | | | | |
| Human- | 1 | -1 | TTTG | GTGAATATATTATTGGATTTCTAT | 1152 | GUGAAUAUAUUAUUGGAUUUCUAU | 1475 |
| Exon 50 | | | | | | | |
| Human- | 2 | -1 | TTTG | AAGATAATTCATGAACATCTTAAT | 1153 | AAGAUAAUUCAUGAACAUCUUAAU | 1476 |
| Exon 50 | | | | | | | |
| Human- | 3 | -1 | TTTA | ACAGAAAAGCATACACATTACTTA | 1154 | ACAGAAAAGCAUACACAUUACUUA | 1477 |
| Exon 50 | | | | | | | |
| Human- | 4 | 1 | TTTT | CTGTTAAAGAGGAAGTTAGAAGAT | 1155 | CUGUUAAAGAGGAAGUUAGAAGAU | 1478 |
| Exon 50 | | | | | | | |
| Human- | 5 | 1 | TTTC | TGTTAAAGAGGAAGTTAGAAGATC | 1156 | UGUUAAAGAGGAAGUUAGAAGAUC | 1479 |
| Exon 50 | | | | | | | |
| Human- | 6 | -1 | TTTA | CCGCCTTCCACTCAGAGCTCAGAT | 1157 | CCGCCUUCCACUCAGAGCUCAGAU | 1480 |
| Exon 50 | | | | | | | |
| Human- | 7 | -1 | TTTG | CCCTCAGCTCTTGAAGTAAACGGT | 1158 | CCCUCAGCUCUUGAAGUAAACGGU | 1481 |
| Exon 50 | | | | | | | |
| Human- | 8 | 1 | TTTA | CTTCAAGAGCTGAGGGCAAAGCAG | 1159 | CUUCAAGAGCUGAGGGCAAAGCAG | 1482 |
| Exon 50 | | | | | | | |
| Human- | 9 | -1 | TTTG | AACAAATAGCTAGAGCCAAAGAGA | 1160 | AACAAAUAGCUAGAGCCAAAGAGA | 1483 |
| Exon 50 | | | | | | | |
| Human- | 10 | -1 | TTTT | GAACAAATAGCTAGAGCCAAAGAG | 1161 | GAACAAAUAGCUAGAGCCAAAGAG | 1484 |
| Exon 50 | | | | | | | |
| Human- | 11 | 1 | TTTG | GCTCTAGCTATTTGTTCAAAAGTG | 1162 | GCUCUAGCUAUUUGUUCAAAAGUG | 1485 |
| Exon 50 | | | | | | | |
| Human- | 12 | 1 | TTTG | TTCAAAAGTGCAACTATGAAGTGA | 1163 | UUCAAAAGUGCAACUAUGAAGUGA | 1486 |
| Exon 50 | | | | | | | |
| Human- | 13 | -1 | TTTC | TCTCTCACCCAGTCATCACTTCAT | 1164 | UCUCUCACCCAGUCAUCACUUCAU | 1487 |
| Exon 50 | | | | | | | |
| Human- | 14 | -1 | TTTT | CTCTCTCACCCAGTCATCACTTCA | 1165 | CUCUCUCACCCAGUCAUCACUUCA | 1488 |
| Exon 50 | | | | | | | |
| Human- | 1 | 1 | TTTG | tatatatatatatatTTTTCTCTT | 1166 | uauauauauauauauUUUUCUCUU | 1489 |
| Exon 43 | | | | | | | |
| Human- | 2 | 1 | tTTT | TCTCTTTCTATAGACAGCTAATTC | 1167 | UCUCUUUCUAUAGACAGCUAAUUC | 1490 |
| Exon 43 | | | | | | | |
| Human- | 3 | 1 | TTTT | CTCTTTCTATAGACAGCTAATTCA | 1168 | CUCUUUCUAUAGACAGCUAAUUCA | 1491 |
| Exon 43 | | | | | | | |
| Human- | 4 | -1 | TTTA | AAACAGTAAAAAAATGAATTAGCT | 1169 | AAACAGUAAAAAAAUGAAUUAGCU | 1492 |
| Exon 43 | | | | | | | |
| Human- | 5 | 1 | TTTC | TCTTTCTATAGACAGCTAATTCAT | 1170 | UCUUUCUAUAGACAGCUAAUUCAU | 1493 |
| Exon 43 | | | | | | | |
| Human- | 6 | -1 | TTTT | AAAACAGTAAAAAAATGAATTAGC | 1171 | AAAACAGUAAAAAAAUGAAUUAGC | 1494 |
| Exon 43 | | | | | | | |
| Human- | 7 | 1 | TTTC | TATAGACAGCTAATTCATTTTTTT | 1172 | UAUAGACAGCUAAUUCAUUUUUUU | 1495 |
| Exon 43 | | | | | | | |
| Human- | 8 | -1 | TTTA | TATTCTGTAATATAAAAATTTTAA | 1173 | UAUUCUGUAAUAUAAAAAUUUUAA | 1496 |
| Exon 43 | | | | | | | |
| Human- | 9 | -1 | TTTT | ATATTCTGTAATATAAAAATTTTA | 1174 | AUAUUCUGUAAUAUAAAAAUUUUA | 1497 |
| Exon 43 | | | | | | | |
| Human- | 10 | 1 | TTTT | TTTACTGTTTTAAAATTTTTATAT | 1175 | UUUACUGUUUUAAAAUUUUUAUAU | 1498 |
| Exon 43 | | | | | | | |
| Human- | 11 | 1 | TTTT | TTACTGTTTTAAAATTTTTATATT | 1176 | UUACUGUUUUAAAAUUUUUAUAUU | 1499 |
| Exon 43 | | | | | | | |
| Human- | 12 | 1 | TTTT | TACTGTTTTAAAATTTTTATATTA | 1177 | UACUGUUUUAAAAUUUUUAUAUUA | 1500 |
| Exon 43 | | | | | | | |
| Human- | 13 | 1 | TTTT | ACTGTTTTAAAATTTTTATATTAC | 1178 | ACUGUUUUAAAAUUUUUAUAUUAC | 1501 |
| Exon 43 | | | | | | | |
| Human- | 14 | 1 | TTTA | CTGTTTTAAAATTTTTATATTACA | 1179 | CUGUUUUAAAAUUUUUAUAUUACA | 1502 |
| Exon 43 | | | | | | | |
| Human- | 15 | 1 | TTTT | AAAATTTTTATATTACAGAATATA | 1180 | AAAAUUUUUAUAUUACAGAAUAUA | 1503 |
| Exon 43 | | | | | | | |
| Human- | 16 | 1 | TTTA | AAATTTTTATATTACAGAATATAA | 1181 | AAAUUUUUAUAUUACAGAAUAUAA | 1504 |
| Exon 43 | | | | | | | |
| Human- | 17 | -1 | TTTG | TTGTAGACTATCTTTTATATTCTG | 1182 | UUGUAGACUAUCUUUUAUAUUCUG | 1505 |
| Exon 43 | | | | | | | |
| Human- | 18 | 1 | TTTT | TATATTACAGAATATAAAAGATAG | 1183 | UAUAUUACAGAAUAUAAAAGAUAG | 1506 |
| Exon 43 | | | | | | | |
| Human- | 19 | 1 | TTTT | ATATTACAGAATATAAAAGATAGT | 1184 | AUAUUACAGAAUAUAAAAGAUAGU | 1507 |
| Exon 43 | | | | | | | |
| Human- | 20 | 1 | TTTA | TATTACAGAATATAAAAGATAGTC | 1185 | UAUUACAGAAUAUAAAAGAUAGUC | 1508 |
| Exon 43 | | | | | | | |
| Human- | 21 | -1 | TTTG | CAATGCTGCTGTCTTCTTGCTATG | 1186 | CAAUGCUGCUGUCUUCUUGCUAUG | 1509 |
| Exon 43 | | | | | | | |
| Human- | 22 | 1 | TTTC | CAATGGGAAAAAGTTAACAAAATG | 1187 | CAAUGGGAAAAAGUUAACAAAAUG | 1510 |
| Exon 43 | | | | | | | |
| Human- | 23 | -1 | TTTC | TGCAAGTATCAAGAAAAATATATG | 1188 | UGCAAGUAUCAAGAAAAAUAUAUG | 1511 |
| Exon 43 | | | | | | | |
| Human- | 24 | 1 | TTTT | TCTTGATACTTGCAGAAATGATTT | 1189 | UCUUGAUACUUGCAGAAAUGAUUU | 1512 |
| Exon 43 | | | | | | | |
| Human- | 25 | 1 | TTTT | CTTGATACTTGCAGAAATGATTTG | 1190 | CUUGAUACUUGCAGAAAUGAUUUG | 1513 |
| Exon 43 | | | | | | | |
| Human- | 26 | 1 | TTTC | TTGATACTTGCAGAAATGATTTGT | 1191 | UUGAUACUUGCAGAAAUGAUUUGU | 1514 |
| Exon 43 | | | | | | | |
| Human- | 27 | 1 | TTTG | TTTTCAGGGAACTGTAGAATTTAT | 1192 | UUUUCAGGGAACUGUAGAAUUUAU | 1515 |
| Exon 43 | | | | | | | |
| Human- | 28 | -1 | TTTC | CATGGAGGGTACTGAAATAAATTC | 1193 | CAUGGAGGGUACUGAAAUAAAUUC | 1516 |
| Exon 43 | | | | | | | |
| Human- | 29 | -1 | TTTT | CCATGGAGGGTACTGAAATAAATT | 1194 | CCAUGGAGGGUACUGAAAUAAAUU | 1517 |
| Exon 43 | | | | | | | |
| Human- | 30 | 1 | TTTT | CAGGGAACTGTAGAATTTATTTCA | 1195 | CAGGGAACUGUAGAAUUUAUUUCA | 1518 |
| Exon 43 | | | | | | | |
| Human- | 31 | -1 | TTTT | TCCATGGAGGGTACTGAAATAAAT | 1196 | UCCAUGGAGGGUACUGAAAUAAAU | 1519 |
| Exon 43 | | | | | | | |
| Human- | 32 | 1 | TTTC | AGGGAACTGTAGAATTTATTTCAG | 1197 | AGGGAACUGUAGAAUUUAUUUCAG | 1520 |
| Exon 43 | | | | | | | |
| Human- | 33 | -1 | TTTT | TTCCATGGAGGGTACTGAAATAAA | 1198 | UUCCAUGGAGGGUACUGAAAUAAA | 1521 |
| Exon 43 | | | | | | | |
| Human- | 34 | -1 | TTTC | CCTGTCTTTTTTCCATGGAGGGTA | 1199 | CCUGUCUUUUUUCCAUGGAGGGUA | 1522 |
| Exon 43 | | | | | | | |
| Human- | 35 | -1 | TTTT | CCCTGTCTTTTTTCCATGGAGGGT | 1200 | CCCUGUCUUUUUUCCAUGGAGGGU | 1523 |
| Exon 43 | | | | | | | |
| Human- | 36 | -1 | TTTT | TCCCTGTCTTTTTTCCATGGAGGG | 1201 | UCCCUGUCUUUUUUCCAUGGAGGG | 1524 |
| Exon 43 | | | | | | | |
| Human- | 37 | 1 | TTTA | TTTCAGTACCCTCCATGGAAAAAA | 1202 | UUUCAGUACCCUCCAUGGAAAAAA | 1525 |
| Exon 43 | | | | | | | |
| Human- | 38 | 1 | TTTC | AGTACCCTCCATGGAAAAAAGACA | 1203 | AGUACCCUCCAUGGAAAAAAGACA | 1526 |
| Exon 43 | | | | | | | |
| Human- | 1 | 1 | TTTA | AGTTTGCATGGTTCTTGCTCAAGG | 1204 | AGUUUGCAUGGUUCUUGCUCAAGG | 1527 |
| Exon 6 | | | | | | | |
| Human- | 2 | -1 | TTTC | ATAAGAAAATGCATTCCTTGAGCA | 1205 | AUAAGAAAAUGCAUUCCUUGAGCA | 1528 |
| Exon 6 | | | | | | | |
| Human- | 3 | -1 | TTTT | CATAAGAAAATGCATTCCTTGAGC | 1206 | CAUAAGAAAAUGCAUUCCUUGAGC | 1529 |
| Exon 6 | | | | | | | |
| Human- | 4 | 1 | TTTG | CATGGTTCTTGCTCAAGGAATGCA | 1207 | CAUGGUUCUUGCUCAAGGAAUGCA | 1530 |
| Exon 6 | | | | | | | |
| Human- | 5 | -1 | TTTG | ACCTACATGTGGAAATAAATTTTC | 1208 | ACCUACAUGUGGAAAUAAAUUUUC | 1531 |
| Exon 6 | | | | | | | |
| Human- | 6 | -1 | TTTT | GACCTACATGTGGAAATAAATTTT | 1209 | GACCUACAUGUGGAAAUAAAUUUU | 1532 |
| Exon 6 | | | | | | | |
| Human- | 7 | -1 | TTTT | TGACCTACATGTGGAAATAAATTT | 1210 | UGACCUACAUGUGGAAAUAAAUUU | 1533 |
| Exon 6 | | | | | | | |
| Human- | 8 | 1 | TTTT | CTTATGAAAATTTATTTCCACATG | 1211 | CUUAUGAAAAUUUAUUUCCACAUG | 1534 |
| Exon 6 | | | | | | | |
| Human- | 9 | 1 | TTTC | TTATGAAAATTTATTTCCACATGT | 1212 | UUAUGAAAAUUUAUUUCCACAUGU | 1535 |
| Exon 6 | | | | | | | |
| Human- | 10 | -1 | TTTC | ATTACATTTTTGACCTACATGTGG | 1213 | AUUACAUUUUUGACCUACAUGUGG | 1536 |
| Exon 6 | | | | | | | |
| Human- | 11 | -1 | TTTT | CATTACATTTTTGACCTACATGTG | 1214 | CAUUACAUUUUUGACCUACAUGUG | 1537 |
| Exon 6 | | | | | | | |
| Human- | 12 | -1 | TTTT | TCATTACATTTTTGACCTACATGT | 1215 | UCAUUACAUUUUUGACCUACAUGU | 1538 |
| Exon 6 | | | | | | | |
| Human- | 13 | 1 | TTTA | TTTCCACATGTAGGTCAAAAATGT | 1216 | UUUCCACAUGUAGGUCAAAAAUGU | 1539 |
| Exon 6 | | | | | | | |
| Human- | 14 | 1 | TTTC | CACATGTAGGTCAAAAATGTAATG | 1217 | CACAUGUAGGUCAAAAAUGUAAUG | 1540 |
| Exon 6 | | | | | | | |
| Human- | 15 | -1 | TTTG | TTGCAATCCAGCCATGATATTTTT | 1218 | UUGCAAUCCAGCCAUGAUAUUUUU | 1541 |
| Exon 6 | | | | | | | |
| Human- | 16 | -1 | TTTC | ACTGTTGGTTTGTTGCAATCCAGC | 1219 | ACUGUUGGUUUGUUGCAAUCCAGC | 1542 |
| Exon 6 | | | | | | | |
| Human- | 17 | -1 | TTTT | CACTGTTGGTTTGTTGCAATCCAG | 1220 | CACUGUUGGUUUGUUGCAAUCCAG | 1543 |
| Exon 6 | | | | | | | |
| Human- | 18 | 1 | TTTG | AATGCTCTCATCCATAGTCATAGG | 1221 | AAUGCUCUCAUCCAUAGUCAUAGG | 1544 |
| Exon 6 | | | | | | | |
| Human- | 19 | -1 | TTTA | ATGTCTCAGTAATCTTCTTACCTA | 1222 | AUGUCUCAGUAAUCUUCUUACCUA | 1545 |
| Exon 6 | | | | | | | |
| Human- | 20 | -1 | TTTA | CAAGTTATTTAATGTCTCAGTAAT | 1223 | CAAGUUAUUUAAUGUCUCAGUAAU | 1546 |
| Exon 6 | | | | | | | |
| Human- | 21 | -1 | TTTT | ACAAGTTATTTAATGTCTCAGTAA | 1224 | ACAAGUUAUUUAAUGUCUCAGUAA | 1547 |
| Exon 6 | | | | | | | |
| Human- | 22 | 1 | TTTA | GACTCTGATGACATATTTTTCCCC | 1225 | GACUCUGAUGACAUAUUUUUCCCC | 1548 |
| Exon 6 | | | | | | | |
| Human- | 23 | 1 | TTTT | TCCCCAGTATGGTTCCAGATCATG | 1226 | UCCCCAGUAUGGUUCCAGAUCAUG | 1549 |
| Exon 6 | | | | | | | |
| Human- | 24 | 1 | TTTT | CCCCAGTATGGTTCCAGATCATGT | 1227 | CCCCAGUAUGGUUCCAGAUCAUGU | 1550 |
| Exon 6 | | | | | | | |
| Human- | 25 | 1 | TTTC | CCCAGTATGGTTCCAGATCATGTC | 1228 | CCCAGUAUGGUUCCAGAUCAUGUC | 1551 |
| Exon 6 | | | | | | | |
| Human- | 1 | 1 | TTTA | TATTTGTCTTtgtgtatgtgtgta | 1229 | UAUUUGUCUUuguguaugugugua | 1552 |
| Exon 7 | | | | | | | |
| Human- | 2 | 1 | TTTG | TCTTtgtgtatgtgtgtatgtgta | 1230 | UCUUuguguauguguguaugugua | 1553 |
| Exon 7 | | | | | | | |
| Human- | 3 | 1 | TTtg | tgtatgtgtgtatgtgtatgtgtt | 1231 | uguauguguguauguguauguguu | 1554 |
| Exon 7 | | | | | | | |
| Human- | 4 | 1 | ttTT | AGGCCAGACCTATTTGACTGGAAT | 1232 | AGGCCAGACCUAUUUGACUGGAAU | 1555 |
| Exon 7 | | | | | | | |
| Human- | 5 | 1 | tTTA | GGCCAGACCTATTTGACTGGAATA | 1233 | GGCCAGACCUAUUUGACUGGAAUA | 1556 |
| Exon 7 | | | | | | | |
| Human- | 6 | 1 | TTTG | ACTGGAATAGTGTGGTTTGCCAGC | 1234 | ACUGGAAUAGUGUGGUUUGCCAGC | 1557 |
| Exon 7 | | | | | | | |
| Human- | 7 | 1 | TTTG | CCAGCAGTCAGCCACACAACGACT | 1235 | CCAGCAGUCAGCCACACAACGACU | 1558 |
| Exon 7 | | | | | | | |
| Human- | 8 | -1 | TTTC | TCTATGCCTAATTGATATCTGGCG | 1236 | UCUAUGCCUAAUUGAUAUCUGGCG | 1559 |
| Exon 7 | | | | | | | |
| Human- | 9 | -1 | TTTA | CCAACCTTCAGGATCGAGTAGTTT | 1237 | CCAACCUUCAGGAUCGAGUAGUUU | 1560 |
| Exon 7 | | | | | | | |
| Human- | 10 | 1 | TTTC | TGGACTACCACTGCTTTTAGTATG | 1238 | UGGACUACCACUGCUUUUAGUAUG | 1561 |
| Exon 7 | | | | | | | |
| Human- | 11 | 1 | TTTT | AGTATGGTAGAGTTTAATGTTTTC | 1239 | AGUAUGGUAGAGUUUAAUGUUUUC | 1562 |
| Exon 7 | | | | | | | |
| Human- | 12 | 1 | TTTA | GTATGGTAGAGTTTAATGTTTTCA | 1240 | GUAUGGUAGAGUUUAAUGUUUUCA | 1563 |
| Exon 7 | | | | | | | |
| Human- | 1 | -1 | TTTG | AGACTCTAAAAGGATAATGAACAA | 1241 | AGACUCUAAAAGGAUAAUGAACAA | 1564 |
| Exon 8 | | | | | | | |
| Human- | 2 | 1 | TTTA | ACTTTGATTTGTTCATTATCCTTT | 1242 | ACUUUGAUUUGUUCAUUAUCCUUU | 1565 |
| Exon 8 | | | | | | | |
| Human- | 3 | -1 | TTTC | TATATTTGAGACTCTAAAAGGATA | 1243 | UAUAUUUGAGACUCUAAAAGGAUA | 1566 |
| Exon 8 | | | | | | | |
| Human- | 4 | 1 | TTTG | ATTTGTTCATTATCCTTTTAGAGT | 1244 | AUUUGUUCAUUAUCCUUUUAGAGU | 1567 |
| Exon 8 | | | | | | | |
| Human- | 5 | -1 | TTTG | GTTTCTATATTTGAGACTCTAAAA | 1245 | GUUUCUAUAUUUGAGACUCUAAAA | 1568 |
| Exon 8 | | | | | | | |
| Human- | 6 | -1 | TTTT | GGTTTCTATATTTGAGACTCTAAA | 1246 | GGUUUCUAUAUUUGAGACUCUAAA | 1569 |
| Exon 8 | | | | | | | |
| Human- | 7 | -1 | TTTT | TGGTTTCTATATTTGAGACTCTAA | 1247 | UGGUUUCUAUAUUUGAGACUCUAA | 1570 |
| Exon 8 | | | | | | | |
| Human- | 8 | 1 | TTTG | TTCATTATCCTTTTAGAGTCTCAA | 1248 | UUCAUUAUCCUUUUAGAGUCUCAA | 1571 |
| Exon 8 | | | | | | | |
| Human- | 9 | 1 | TTTT | AGAGTCTCAAATATAGAAACCAAA | 1249 | AGAGUCUCAAAUAUAGAAACCAAA | 1572 |
| Exon 8 | | | | | | | |
| Human- | 10 | 1 | TTTA | GAGTCTCAAATATAGAAACCAAAA | 1250 | GAGUCUCAAAUAUAGAAACCAAAA | 1573 |
| Exon 8 | | | | | | | |
| Human- | 11 | -1 | TTTC | CACTTCCTGGATGGCTTCAATGCT | 1251 | CACUUCCUGGAUGGCUUCAAUGCU | 1574 |
| Exon 8 | | | | | | | |
| Human- | 12 | 1 | TTTT | GCCTCAACAAGTGAGCATTGAAGC | 1252 | GCCUCAACAAGUGAGCAUUGAAGC | 1575 |
| Exon 8 | | | | | | | |
| Human- | 13 | 1 | TTTG | CCTCAACAAGTGAGCATTGAAGCC | 1253 | CCUCAACAAGUGAGCAUUGAAGCC | 1576 |
| Exon 8 | | | | | | | |
| Human- | 14 | -1 | TTTA | GGTGGCCTTGGCAACATTTCCACT | 1254 | GGUGGCCUUGGCAACAUUUCCACU | 1577 |
| Exon 8 | | | | | | | |
| Human- | 15 | -1 | TTTA | GTCACTTTAGGTGGCCTTGGCAAC | 1255 | GUCACUUUAGGUGGCCUUGGCAAC | 1578 |
| Exon 8 | | | | | | | |
| Human- | 16 | -1 | TTTG | ATGATGTAACTGAAAATGTTCTTC | 1256 | AUGAUGUAACUGAAAAUGUUCUUC | 1579 |
| Exon 8 | | | | | | | |
| Human- | 17 | -1 | TTTA | CCTGTTGAGAATAGTGCATTTGAT | 1257 | CCUGUUGAGAAUAGUGCAUUUGAU | 1580 |
| Exon 8 | | | | | | | |
| Human- | 18 | 1 | TTTT | CAGTTACATCATCAAATGCACTAT | 1258 | CAGUUACAUCAUCAAAUGCACUAU | 1581 |
| Exon 8 | | | | | | | |
| Human- | 19 | 1 | TTTC | AGTTACATCATCAAATGCACTATT | 1259 | AGUUACAUCAUCAAAUGCACUAUU | 1582 |
| Exon 8 | | | | | | | |
| Human- | 20 | -1 | TTTA | CACACTTTACCTGTTGAGAATAGT | 1260 | CACACUUUACCUGUUGAGAAUAGU | 1583 |
| Exon 8 | | | | | | | |
| Human- | 21 | 1 | TTTT | CTGTTTTATATGCATTTTTAGGTA | 1261 | CUGUUUUAUAUGCAUUUUUAGGUA | 1584 |
| Exon 8 | | | | | | | |
| Human- | 22 | 1 | TTTC | TGTTTTATATGCATTTTTAGGTAT | 1262 | UGUUUUAUAUGCAUUUUUAGGUAU | 1585 |
| Exon 8 | | | | | | | |
| Human- | 23 | 1 | TTTT | ATATGCATTTTTAGGTATTACGTG | 1263 | AUAUGCAUUUUUAGGUAUUACGUG | 1586 |
| Exon 8 | | | | | | | |
| Human- | 24 | 1 | TTTA | TATGCATTTTTAGGTATTACGTGC | 1264 | UAUGCAUUUUUAGGUAUUACGUGC | 1587 |
| Exon 8 | | | | | | | |
| Human- | 25 | 1 | TTTT | TAGGTATTACGTGCACatatatat | 1265 | UAGGUAUUACGUGCACauauauau | 1588 |
| Exon 8 | | | | | | | |
| Human- | 26 | 1 | TTTT | AGGTATTACGTGCACatatatata | 1266 | AGGUAUUACGUGCACauauauaua | 1589 |
| Exon 8 | | | | | | | |
| Human- | 27 | 1 | TTTA | GGTATTACGTGCACatatatatat | 1267 | GGUAUUACGUGCACauauauauau | 1590 |
| Exon 8 | | | | | | | |
| Human- | 1 | -1 | TTTA | AGCAACAACTATAATATTGTGCAG | 1268 | AGCAACAACUAUAAUAUUGUGCAG | 1591 |
| Exon 55 | | | | | | | |
| Human- | 2 | 1 | TTTA | GTTCCTCCATCTTTCTCTTTTTAT | 1269 | GUUCCUCCAUCUUUCUCUUUUUAU | 1592 |
| Exon 55 | | | | | | | |
| Human- | 3 | 1 | TTTC | TCTTTTTATGGAGTTCACTAGGTG | 1270 | UCUUUUUAUGGAGUUCACUAGGUG | 1593 |
| Exon 55 | | | | | | | |
| Human- | 4 | 1 | TTTT | TATGGAGTTCACTAGGTGCACCAT | 1271 | UAUGGAGUUCACUAGGUGCACCAU | 1594 |
| Exon 55 | | | | | | | |
| Human- | 5 | 1 | TTTT | ATGGAGTTCACTAGGTGCACCATT | 1272 | AUGGAGUUCACUAGGUGCACCAUU | 1595 |
| Exon 55 | | | | | | | |
| Human- | 6 | 1 | TTTA | TGGAGTTCACTAGGTGCACCATTC | 1273 | UGGAGUUCACUAGGUGCACCAUUC | 1596 |
| Exon 55 | | | | | | | |
| Human- | 7 | 1 | TTTA | ATAATTGCATCTGAACATTTGGTC | 1274 | AUAAUUGCAUCUGAACAUUUGGUC | 1597 |
| Exon 55 | | | | | | | |
| Human- | 8 | 1 | TTTG | GTCCTTTGCAGGGTGAGTGAGCGA | 1275 | GUCCUUUGCAGGGUGAGUGAGCGA | 1598 |
| Exon 55 | | | | | | | |
| Human- | 9 | -1 | TTTC | TTCCAAAGCAGCCTCTCGCTCACT | 1276 | UUCCAAAGCAGCCUCUCGCUCACU | 1599 |
| Exon 55 | | | | | | | |
| Human- | 10 | 1 | TTTG | CAGGGTGAGTGAGCGAGAGGCTGC | 1277 | CAGGGUGAGUGAGCGAGAGGCUGC | 1600 |
| Exon 55 | | | | | | | |
| Human- | 11 | 1 | TTTG | GAAGAAACTCATAGATTACTGCAA | 1278 | GAAGAAACUCAUAGAUUACUGCAA | 1601 |
| Exon 55 | | | | | | | |
| Human- | 12 | -1 | TTTC | CAGGTCCAGGGGGAACTGTTGCAG | 1279 | CAGGUCCAGGGGGAACUGUUGCAG | 1602 |
| Exon 55 | | | | | | | |
| Human- | 13 | -1 | TTTT | CCAGGTCCAGGGGGAACTGTTGCA | 1280 | CCAGGUCCAGGGGGAACUGUUGCA | 1603 |
| Exon 55 | | | | | | | |
| Human- | 14 | -1 | TTTC | AGCTTCTGTAAGCCAGGCAAGAAA | 1281 | AGCUUCUGUAAGCCAGGCAAGAAA | 1604 |
| Exon 55 | | | | | | | |
| Human- | 15 | 1 | TTTC | TTGCCTGGCTTACAGAAGCTGAAA | 1282 | UUGCCUGGCUUACAGAAGCUGAAA | 1605 |
| Exon 55 | | | | | | | |
| Human- | 16 | -1 | TTTC | CTTACGGGTAGCATCCTGTAGGAC | 1283 | CUUACGGGUAGCAUCCUGUAGGAC | 1606 |
| Exon 55 | | | | | | | |
| Human- | 17 | -1 | TTTA | CTCCCTTGGAGTCTTCTAGGAGCC | 1284 | CUCCCUUGGAGUCUUCUAGGAGCC | 1607 |
| Exon 55 | | | | | | | |
| Human- | 18 | -1 | TTTT | ACTCCCTTGGAGTCTTCTAGGAGC | 1285 | ACUCCCUUGGAGUCUUCUAGGAGC | 1608 |
| Exon 55 | | | | | | | |
| Human- | 19 | -1 | TTTC | ATCAGCTCTTTTACTCCCTTGGAG | 1286 | AUCAGCUCUUUUACUCCCUUGGAG | 1609 |
| Exon 55 | | | | | | | |
| Human- | 20 | 1 | TTTC | CGCTTTAGCACTCTTGTGGATCCA | 1287 | CGCUUUAGCACUCUUGUGGAUCCA | 1610 |
| Exon 55 | | | | | | | |
| Human- | 21 | 1 | TTTA | GCACTCTTGTGGATCCAATTGAAC | 1288 | GCACUCUUGUGGAUCCAAUUGAAC | 1611 |
| Exon 55 | | | | | | | |
| Human- | 22 | -1 | TTTG | TCCCTGGCTTGTCAGTTACAAGTA | 1289 | UCCCUGGCUUGUCAGUUACAAGUA | 1612 |
| Exon 55 | | | | | | | |
| Human- | 23 | -1 | TTTT | GTCCCTGGCTTGTCAGTTACAAGT | 1290 | GUCCCUGGCUUGUCAGUUACAAGU | 1613 |
| Exon 55 | | | | | | | |
| Human- | 24 | -1 | TTTG | TTTTGTCCCTGGCTTGTCAGTTAC | 1291 | UUUUGUCCCUGGCUUGUCAGUUAC | 1614 |
| Exon 55 | | | | | | | |
| Human- | 25 | -1 | TTTT | GTTTTGTCCCTGGCTTGTCAGTTA | 1292 | GUUUUGUCCCUGGCUUGUCAGUUA | 1615 |
| Exon 55 | | | | | | | |
| Human- | 26 | 1 | TTTG | TACTTGTAACTGACAAGCCAGGGA | 1293 | UACUUGUAACUGACAAGCCAGGGA | 1616 |
| Exon 55 | | | | | | | |
| Human- | | 1 | TTTA | gCTCCTACTCAGACTGTTACTCTG | 1294 | gCUCCUACUCAGACUGUUACUCUG | 1617 |
| G1-exon51 | | | | | | | |
| Human- | | 1 | TTTC | taccatgtattgctaaacaaagta | 1295 | uaccauguauugcuaaacaaagua | 1618 |
| G2-exon51 | | | | | | | |
| Human- | | -1 | TTTA | attgaagagtaacaatttgagcca | 1296 | auugaagaguaacaauuugagcca | 1619 |
| G3-exon51 | | | | | | | |
| mouse- | | 1 | TTTG | aggctctgcaaagttctTTGAAAG | 1297 | aggcucugcaaaguucuUUGAAAG | 1620 |
| Exon23- | | | | | | | |
| G1 | | | | | | | |
| mouse- | | 1 | TTTG | AAAGAGCAACAAAATGGCttcaac | 1298 | AAAGAGCAACAAAAUGGCuucaac | 1621 |
| Exon23- | | | | | | | |
| G2 | | | | | | | |
| mouse- | | 1 | TTTG | AAAGAGCAATAAAATGGCttcaac | 1299 | AAAGAGCAAUAAAAUGGCuucaac | 1622 |
| Exon23- | | | | | | | |
| G3 | | | | | | | |
| mouse- | | -1 | TTTC | AAAGAACTTTGCAGAGCctcaaaa | 1300 | AAAGAACUUUGCAGAGCcucaaaa | 1623 |
| Exon23- | | | | | | | |
| G4 | | | | | | | |
| mouse- | | -1 | TTTA | ctgaatatctatgcattaataact | 1301 | cugaauaucuaugcauuaauaacu | 1624 |
| Exon23- | | | | | | | |
| G5 | | | | | | | |
| mouse- | | -1 | TTTC | tattatattacagggcatattata | 1302 | ummaummacagggcaummaua | 1625 |
| Exon23- | | | | | | | |
| G6 | | | | | | | |
| mouse- | | 1 | TTTC | Aggtaagccgaggtttggccttta | 1303 | Agguaagccgagguuuggccuuua | 1626 |
| Exon23- | | | | | | | |
| G7 | | | | | | | |
| mouse- | | 1 | TTTA | cccagagtccttcaaagatattga | 1304 | cccagaguccuucaaagauauuga | 1627 |
| Exon23- | | | | | | | |
| G8 | | | | | | | |

*In this table, upper case letters represent sgRNA nucleotides that align to the exon sequence of the gene. Lower case letters represent sgRNA nucleotides that align to the intron sequence of the gene

TABLE 19
Additional gRNA targeting sequences

| | | | | | | SEQ | |
|---|---|---|---|---|---|---|---|
| Name | Species | Gene | Target | Strand | Sequence | ID NO | PAM |
| DCR1 | Human | DMD | Intron | + | attggctttgatttcccta | 1628 | GGG |
| | | | 50 | | | | |
| DCR2 | Human | DMD | Intron | - | tgtagagtaagtcagccta | 1629 | TGG |
| | | | 50 | | | | |
| DCR3 | Human | DMD | Exon | + | cctactcagactgttactc | 1630 | TGG |
| | | | 51-55′ | | | | |
| DCR4 | Human | DMD | Exon | + | ttggacagaacttaccgac | 1631 | TGG |
| | | | 51-53′ | | | | |
| DCR5 | Human | DMD | Intron | - | cagttgcctaagaactggt | 1632 | GGG |
| | | | 51 | | | | |
| DCR6 | Human | DMD | Intron | - | GGGCTCCACCCTCACGAGT | 1633 | GGG |
| | | | 44 | | | | |
| DCR7 | Human | DMD | Intron | + | TTTGCTTCGCTATAAAACG | 1634 | AGG |
| | | | 55 | | | | |
| DCR8 | Human | DMD | Exon 41 | + | TCTGAGGATGGGGCCGCAA | 1635 | TGG |
| DCR9 | Human | DMD | Exon 44 | - | GATCTGTCAAATCGCCTGC | 1636 | AGG |
| DCR10 | Human | DMD | Exon 45 | + | CCAGGATGGCATTGGGCAG | 1637 | CGG |
| DCR11 | Human | DMD | Exon 45 | + | CTGAATCTGCGGTGGCAGG | 1638 | AGG |
| DCR12 | Human | DMD | Exon 46 | - | TTCTTTTGTTCTTCTAGCc | 1639 | TGG |
| DCR13 | Human | DMD | Exon 46 | + | GAAAAGCTTGAGCAAGTCA | 1640 | AGG |
| DCR14 | Human | DMD | Exon 47 | + | GAAGAGTTGCCCCTGCGCC | 1641 | AGG |
| DCR15 | Human | DMD | Exon 47 | + | ACAAATCTCCAGTGGATAA | 1642 | AGG |
| DCR16 | Human | DMD | Exon 48 | - | TGTTTCTCAGGTAAAGCTC | 1643 | TGG |
| DCR17 | Human | DMD | Exon 48 | + | GAAGGACCATTTGACGTTa | 1644 | AGG |
| DCR18 | Human | DMD | Exon 49 | - | AACTGCTATTTCAGTTTCc | 1645 | TGG |
| DCR19 | Human | DMD | Exon 49 | + | CCAGCCACTCAGCCAGTGA | 1646 | AGG |
| DCR20 | Human | DMD | Exon 50 | + | gtatgcttttctgttaaag | 1647 | AGG |
| DCR21 | Human | DMD | Exon 50 | + | CTCCTGGACTGACCACTAT | 1648 | TGG |
| DCR22 | Human | DMD | Exon 52 | + | GAACAGAGGCGTCCCCAGT | 1649 | TGG |
| DCR23 | Human | DMD | Exon 52 | + | GAGGCTAGAACAATCATTA | 1650 | CGG |
| DCR24 | Human | DMD | Exon 53 | + | ACAAGAACACCTTCAGAAC | 1651 | CGG |
| DCR25 | Human | DMD | Exon 53 | - | GGTTTCTGTGATTTTCTTT | 1652 | TGG |
| DCR26 | Human | DMD | Exon 54 | + | GGCCAAAGACCTCCGCCAG | 1653 | TGG |
| DCR27 | Human | DMD | Exon 54 | + | TTGGAGAAGCATTCATAAA | 1654 | AGG |
| DCR28 | Human | DMD | Exon 55 | - | TCGCTCACTCACCctgcaa | 1655 | AGG |
| DCR29 | Human | DMD | Exon 55 | + | AAAAGAGCTGATGAAACAA | 1656 | TGG |
| DCR30 | Human | DMD | 5′UTR/ | + | TAcACTTTTCaAAATGCTT | 1657 | TGG |
| | | | Exon 1 | | | | |
| DCR31 | Human | DMD | Exon 51 | + | gagatgatcatcaagcaga | 1658 | AGG |
| DCR32 | Mouse | DMD | mdx | + | ctttgaaagagcaaTaaaa | 1659 | TGG |
| DCR33 | Human | DMD | Intron | - | CACAAAAGTCAAATCGGAA | 1660 | TGG |
| | | | 44 | | | | |
| DCR34 | Human | DMD | Intron | - | ATTTCAATATAAGATTCGG | 1661 | AGG |
| | | | 44 | | | | |
| DCR35 | Human | DMD | Intron | - | CTTAAGCAATCCCGAACTC | 1662 | TGG |
| | | | 55 | | | | |
| DCR36 | Human | DMD | Intron | - | CCTTCTTTATCCCCTATCG | 1663 | AGG |
| | | | 55 | | | | |
| DCR40 | Mouse | DMD | Exon 23 | - | aggccaaacctcggcttac | 1664 | NNGRR |
| DCR41 | Mouse | DMD | Exon 23 | + | TTCGAAAATTTCAGgtaag | 1665 | NNGRR |
| DCR42 | Mouse | DMD | Exon 23 | + | gcagaacaggagataacag | 1666 | NNGRRT |
| DCR43 | Mouse | ACV | Exon 1 | + | gcggccctcgcccttctct | 1667 | ggggat |
| | | R2B | | | | | |
| DCR48 | Human | DMD | Intron | - | TAGTGATCGTGGATACGAG | 1668 | AGG |
| | | | 45 | | | | |
| DCR49 | Human | DMD | Intron | - | TACAGCCCTCGGTGTATAT | 1669 | TGG |
| | | | 45 | | | | |
| DCR50 | Human | DMD | Intron | - | GGAAGGAATTAAGCCCGAA | 1670 | TGG |
| | | | 52 | | | | |
| DCR51 | Human | DMD | Intron | - | GGAACAGCTTTCGTAGTTG | 1671 | AGG |
| | | | 53 | | | | |
| DCR52 | Human | DMD | Intron | + | ATAAAGTCCAGTGTCGATC | 1672 | AGG |
| | | | 54 | | | | |
| DCR53 | | | Intron | + | AAAACCAGAGCTTCGGTCA | 1673 | AGG |
| | | | 54 | | | | |
| DCR54 | Mouse | Rosa26 | ZFN | + | GAGTCTTCTGGGCAGGCTTAA | 1674 | TGG |
| | | | region | | | | |
| DCR55 | Mouse | Rosa26 | mRNA | - | TCGGGTGAGCATGTCTTTAAT | 1675 | TGG |
| DCR49 | Human | DMD | Ex 51 | - | gtgtcaccagagtaacagt | 1676 | ctgagt |
| DCR50 | Human | DMD | Ex 51 | + | tgatcatcaagcagaaggt | 1677 | atgag |
| DCR60 | Mouse | DMD | Exon 23 | + | AACTTCGAAAATTTCAGgta | 1678 | agccgagg |
| DCR61 | Mouse | DMD | Intron | + | gaaactcatcaaatatgcgt | 1679 | gttagtgt |
| | | | 22 | | | | |
| DCR62 | Mouse | DMD | Intron | - | tcatttacactaacacgcat | 1680 | atttgatg |
| | | | 22 | | | | |
| DCR63 | Mouse | DMD | Intron | + | gaatgaaactcatcaaatat | 1681 | gcgtgtta |
| | | | 22 | | | | |
| DCR64 | Mouse | DMD | Intron | - | tcatcaatatctttgaagga | 1682 | ctctgggt |
| | | | 23 | | | | |
| DCR65 | Mouse | DMD | Intron | - | tgttttcataggaaaaatag | 1683 | gcaagttg |
| | | | 23 | | | | |
| DCR66 | Mouse | DMD | Intron | + | aattggaaaatgtgatggga | 1684 | aacagata |
| | | | 23 | | | | |
| DCR67 | Human | DMD | Exon 51 | + | atgatcatcaagcagaaggt | 1685 | atgagaaa |
| DCR68 | Human | DMD | Exon 51 | + | agatgatcatcaagcagaag | 1686 | gtatgaga |
| DCR69 | Human | DMD | Exon 51 | - | cattttttctcataccttct | 1687 | gcttgatg |
| DCR70 | Human | DMD | Exon 51 | + | tcctactcagactgttactc | 1688 | tggtgaca |
| DCR71 | Human | DMD | Exon 51 | - | acaggttgtgtcaccagagt | 1689 | aacagtct |
| DCR72 | Human | DMD | Exon 51 | - | ttatcattttttctcatacc | 1690 | ttctgctt |
| DCR73 | Human | DMD | Intron | - | ttgcctaagaactggtggga | 1691 | aatggtct |
| | | | 51 | | | | |
| DCR74 | Human | DMD | Intron | - | aaacagttgcctaagaactg | 1692 | gtgggaaa |
| | | | 51 | | | | |
| DCR75 | Human | DMD | Intron | + | tttcccaccagttcttaggc | 1693 | aactgttt |
| | | | 51 | | | | |
| DCR76 | Human | DMD | Intron | + | tggctttgatttccctaggg | 1694 | tccagctt |
| | | | 50 | | | | |
| DCR77 | Human | DMD | Intron | - | tagggaaatcaaagccaatg | 1695 | aaacgttc |
| | | | 50 | | | | |
| DCR78 | Human | DMD | Intron | - | gaccctagggaaatcaaagc | 1696 | caatgaaa |
| | | | 50 | | | | |
| DCR79 | Human | DMD | Intron | - | TGAGGGCTCCACCCTCACGA | 1697 | GTGGGT |
| | | | 44 | | | | TT |
| DCR80 | Human | DMD | Intron | - | AAGGATTGAGGGCTCCACCC | 1698 | TCACGA |
| | | | 44 | | | | GT |
| DCR81 | Human | DMD | Intron | - | GCTCCACCCTCACGAGTGGG | 1699 | TTTGGT |
| | | | 44 | | | | TC |
| DCR82 | Human | DMD | Intron | - | TATCCCCTATCGAGGAAACC | 1700 | ACGAGT |
| | | | 55 | | | | TT |
| DCR83 | Human | DMD | Intron | + | GATAAAGAAGGCCTATTTCA | 1701 | TAGAGT |
| | | | 55 | | | | TG |
| DCR84 | Human | DMD | Intron | - | AGGCCTTCTTTATCCCCTAT | 1702 | CGAGG |
| | | | 55 | | | | AAA |
| DCR85 | Human | DMD | Intron | - | TGAGGGCTCCACCCTCACGA | 1703 | GTGGGT |
| | | | 44 | | | | |
| DCR86 | Human | DMD | Intron | + | GATAAAGAAGGCCTATTTCA | 1704 | TAGAGT |
| | | | 55 | | | | |
| DCR1 | Human | DMD | Intron | + | attggctttgatttcccta | 1705 | GGG |
| | | | 50 | | | | |
| DCR2 | Human | DMD | Intron | - | tgtagagtaagtcagccta | 1706 | TGG |
| | | | 50 | | | | |
| DCR3 | Human | DMD | Exon | + | cctactcagactgttactc | 1707 | TGG |
| | | | 51-5′ | | | | |
| DCR4 | Human | DMD | Exon | + | ttggacagaacttaccgac | 1708 | TGG |
| | | | 51-3′ | | | | |
| DCR5 | Human | DMD | Intron | - | cagttgcctaagaactggt | 1709 | GGG |
| | | | 51 | | | | |
| DCR6 | Human | DMD | Intron | - | GGGCTCCACCCTCACGAGT | 1710 | GGG |
| | | | 44 | | | | |
| DCR7 | Human | DMD | Intron | + | TTTGCTTCGCTATAAAACG | 1711 | AGG |
| | | | 55 | | | | |
| DCR8 | Human | DMD | Exon 41 | + | TCTGAGGATGGGGCCGCAA | 1712 | TGG |
| DCR9 | Human | DMD | Exon 44 | - | GATCTGTCAAATCGCCTGC | 1713 | AGG |
| DCR10 | Human | DMD | Exon 45 | + | CCAGGATGGCATTGGGCAG | 1714 | CGG |
| DCR11 | Human | DMD | Exon 45 | + | CTGAATCTGCGGTGGCAGG | 1715 | AGG |
| DCR12 | Human | DMD | Exon 46 | - | TTCTTTTGTTCTTCTAGCc | 1716 | TGG |
| DCR13 | Human | DMD | Exon 46 | + | GAAAAGCTTGAGCAAGTCA | 1717 | AGG |
| DCR14 | Human | DMD | Exon 47 | + | GAAGAGTTGCCCCTGCGCC | 1718 | AGG |
| DCR15 | Human | DMD | Exon 47 | + | ACAAATCTCCAGTGGATAA | 1719 | AGG |
| DCR16 | Human | DMD | Exon 48 | - | TGTTTCTCAGGTAAAGCTC | 1720 | TGG |
| DCR17 | Human | DMD | Exon 48 | + | GAAGGACCATTTGACGTTa | 1721 | AGG |
| DCR18 | Human | DMD | Exon 49 | - | AACTGCTATTTCAGTTTCc | 1722 | TGG |
| DCR19 | Human | DMD | Exon 49 | + | CCAGCCACTCAGCCAGTGA | 1723 | AGG |
| DCR20 | Human | DMD | Exon 50 | + | gtatgcttttctgttaaag | 1724 | AGG |
| DCR21 | Human | DMD | Exon 50 | + | CTCCTGGACTGACCACTAT | 1725 | TGG |
| DCR22 | Human | DMD | Exon 52 | + | GAACAGAGGCGTCCCCAGT | 1726 | TGG |
| DCR23 | Human | DMD | Exon 52 | + | GAGGCTAGAACAATCATTA | 1727 | CGG |
| DCR24 | Human | DMD | Exon 53 | + | ACAAGAACACCTTCAGAAC | 1728 | CGG |
| DCR25 | Human | DMD | Exon 53 | - | GGTTTCTGTGATTTTCTTT | 1729 | TGG |
| DCR26 | Human | DMD | Exon 54 | + | GGCCAAAGACCTCCGCCAG | 1730 | TGG |
| DCR27 | Human | DMD | Exon 54 | + | TTGGAGAAGCATTCATAAA | 1731 | AGG |
| DCR28 | Human | DMD | Exon 55 | - | TCGCTCACTCACCctgcaa | 1732 | AGG |
| DCR29 | Human | DMD | Exon 55 | + | AAAAGAGCTGATGAAACAA | 1733 | TGG |
| DCR30 | Human | DMD | 5′UTR/ | + | TAcACTTTTCaAAATGCTT | 1734 | TGG |
| | | | Exon 1 | | | | |
| DCR31 | Human | DMD | Exon 51 | + | gagatgatcatcaagcaga | 1735 | AGG |
| DCR32 | Mouse | DMD | mdx | + | ctttgaaagagcaaTaaaa | 1736 | TGG |
| DCR33 | Human | DMD | Intron | - | CACAAAAGTCAAATCGGAA | 1737 | TGG |
| | | | 44 | | | | |
| DCR34 | Human | DMD | Intron | - | ATTTCAATATAAGATTCGG | 1738 | AGG |
| | | | 44 | | | | |
| DCR35 | Human | DMD | Intron | - | CTTAAGCAATCCCGAACTC | 1739 | TGG |
| | | | 55 | | | | |
| DCR36 | Human | DMD | Intron | - | CCTTCTTTATCCCCTATCG | 1740 | AGG |
| | | | 55 | | | | |
| DCR40 | Mouse | DMD | Exon 23 | - | aggccaaacctcggcttac | 1741 | NNGRR |
| DCR41 | Mouse | DMD | Exon 23 | + | TTCGAAAATTTCAGgtaag | 1742 | NNGRR |
| DCR42 | Mouse | DMD | Exon 23 | + | gcagaacaggagataacag | 1743 | NNGRRT |
| DCR43 | Mouse | ACV | Exon 1 | + | gcggccctcgcccttctct | 1744 | ggggat |
| | | R2B | | | | | |
| DCR48 | Human | DMD | Intron | - | TAGTGATCGTGGATACGAG | 1745 | AGG |
| | | | 45 | | | | |
| DCR49 | Human | DMD | Intron | - | TACAGCCCTCGGTGTATAT | 1746 | TGG |
| | | | 45 | | | | |
| DCR50 | Human | DMD | Intron | - | GGAAGGAATTAAGCCCGAA | 1747 | TGG |
| | | | 52 | | | | |
| DCR51 | Human | DMD | Intron | - | GGAACAGCTTTCGTAGTTG | 1748 | AGG |
| | | | 53 | | | | |
| DCR52 | Human | DMD | Intron | + | ATAAAGTCCAGTGTCGATC | 1749 | AGG |
| | | | 54 | | | | |
| DCR53 | | | Intron | + | AAAACCAGAGCTTCGGTCA | 1750 | AGG |
| | | | 54 | | | | |
| DCR54 | Mouse | Rosa26 | ZFN | + | GAGTCTTCTGGGCAGGCTTAA | 1751 | TGG |
| | | | region | | | | |
| DCR55 | Mouse | Rosa26 | mRNA | - | TCGGGTGAGCATGTCTTTAAT | 1752 | TGG |
| DCR49 | Human | DMD | Ex 51 | - | gtgtcaccagagtaacagt | 1753 | ctgagt |
| DCR50 | Human | DMD | Ex 51 | + | tgatcatcaagcagaaggt | 1754 | atgag |
| DCR60 | Mouse | DMD | Exon 23 | + | AACTTCGAAAATTTCAGgta | 1755 | agccgagg |
| DCR61 | Mouse | DMD | Intron | + | gaaactcatcaaatatgcgt | 1756 | gttagtgt |
| | | | 22 | | | | |
| DCR62 | Mouse | DMD | Intron | - | tcatttacactaacacgcat | 1757 | atttgatg |
| | | | 22 | | | | |
| DCR63 | Mouse | DMD | Intron | + | gaatgaaactcatcaaatat | 1758 | gcgtgtta |
| | | | 22 | | | | |
| DCR64 | Mouse | DMD | Intron | - | tcatcaatatctttgaagga | 1759 | ctctgggt |
| | | | 23 | | | | |
| DCR65 | Mouse | DMD | Intron | - | tgttttcataggaaaaatag | 1760 | gcaagttg |
| | | | 23 | | | | |
| DCR66 | Mouse | DMD | Intron | + | aattggaaaatgtgatggga | 1761 | aacagata |
| | | 23 | | | | | |
| DCR67 | Human | DMD | Exon 51 | + | atgatcatcaagcagaaggt | 1762 | atgagaaa |
| DCR68 | Human | DMD | Exon 51 | + | agatgatcatcaagcagaag | 1763 | gtatgaga |
| DCR69 | Human | DMD | Exon 51 | - | cattttttctcataccttct | 1764 | gcttgatg |
| DCR70 | Human | DMD | Exon 51 | + | tcctactcagactgttactc | 1765 | tggtgaca |
| DCR71 | Human | DMD | Exon 51 | - | acaggttgtgtcaccagagt | 1766 | aacagtct |
| DCR72 | Human | DMD | Exon 51 | - | ttatcattttttctcatacc | 1767 | ttctgctt |
| DCR73 | Human | DMD | Intron | - | ttgcctaagaactggtggga | 1768 | aatggtct |
| | | | 51 | | | | |
| DCR74 | Human | DMD | Intron | - | aaacagttgcctaagaactg | 1769 | gtgggaaa |
| | | | 51 | | | | |
| DCR75 | Human | DMD | Intron | + | tttcccaccagttcttaggc | 1770 | aactgttt |
| | | | 51 | | | | |
| DCR76 | Human | DMD | Intron | + | tggctttgatttccctaggg | 1771 | tccagctt |
| | | | 50 | | | | |
| DCR77 | Human | DMD | Intron | - | tagggaaatcaaagccaatg | 1772 | aaacgttc |
| | | | 50 | | | | |
| DCR78 | Human | DMD | Intron | - | gaccctagggaaatcaaagc | 1773 | caatgaaa |
| | | | 50 | | | | |
| DCR79 | Human | DMD | Intron | - | TGAGGGCTCCACCCTCACGA | 1774 | GTGGGT |
| | | | 44 | | | | TT |
| DCR80 | Human | DMD | Intron | - | AAGGATTGAGGGCTCCACCC | 1775 | TCACGA |
| | | | 44 | | | | GT |
| DCR81 | Human | DMD | Intron | - | GCTCCACCCTCACGAGTGGG | 1776 | TTTGGT |
| | | | 44 | | | | TC |
| DCR82 | Human | DMD | Intron | - | TATCCCCTATCGAGGAAACC | 1777 | ACGAGT |
| | | | 55 | | | | TT |
| DCR83 | Human | DMD | Intron | + | GATAAAGAAGGCCTATTTCA | 1778 | TAGAGT |
| | | | 55 | | | | TG |
| DCR84 | Human | DMD | Intron | - | AGGCCTTCTTTATCCCCTAT | 1779 | CGAGG |
| | | | 55 | | | | AAA |
| DCR85 | Human | DMD | Intron | - | TGAGGGCTCCACCCTCACGA | 1780 | GTGGGT |
| | | | 44 | | | | |
| DCR86 | Human | DMD | Intron | + | GATAAAGAAGGCCTATTTCA | 1781 | TAGAGT |
| | | | 55 | | | | |
| | | DMD | | | UAGAAGAUCUGAGCUCUGAG | 1782 | |
| | | DMD | | | AGAUCUGAGCUCUGAGUGGA | 1783 | |
| | | DMD | | | UCUGAGCUCUGAGUGGAAGG | 1784 | |
| | | DMD | | | CCGUUUACUUCAAGAGCUGA | 1785 | |
| | | DMD | | | AAGCAGCCUGACCUAGCUCC | 1786 | |
| | | DMD | | | GCUCCUGGACUGACCACUAU | 1787 | |
| | | DMD | | | CCCUCAGCUCUUGAAGUAAA | 1788 | |
| | | DMD | | | GUCAGUCCAGGAGCUAGGUC | 1789 | |
| | | DMD | | | UAGUGGUCAGUCCAGGAGCU | 1790 | |
| | | DMD | | | GCUCCAAUAGUGGUCAGUCC | 1791 | |
| | | DMD | | | UGGCCAAAGACCUCCGCCAG | 1792 | |
| | | DMD | | | GUGGCAGACAAAUGUAGAUG | 1793 | |
| | | DMD | | | UGUAGAUGUGGCAAAUGACU | 1794 | |
| | | DMD | | | CUUGGCCCUGAAACUUCUCC | 1795 | |
| | | DMD | | | CAGAGAAUAUCAAUGCCUCU | 1796 | |
| | | DMD | | | CAGAGAAUAUCAAUGCCUCU | 1797 | |
| | | DMD | | | CAUUUGUCUGCCACUGGCGG | 1798 | |
| | | DMD | | | CUACAUUUGUCUGCCACUGG | 1799 | |
| | | DMD | | | CAUCUACAUUUGUCUGCCAC | 1800 | |
| | | DMD | | | AUAAUCCCGGAGAAGUUUCA | 1801 | |
| | | DMD | | | UAUCAUCUGCAGAAUAAUCC | 1802 | |
| | | DMD | | | UGUUAUCAUGUGGACUUUUC | 1803 | |
| | | DMD | | | UGAUAUAUCAUUUCUCUGUG | 1804 | |
| | | DMD | | | UUUAUGAAUGCUUCUCCAAG | 1805 | |
| | | DMD | | | UUCUCCAGGCUAGAAGAACAA | 1806 | |
| | | DMD | | | CUGCUCUUUUCCAGGUUCAAG | 1807 | |
| | | DMD | | | GUCUGUUUCAGUUACUGGUGG | 1808 | |
| | | DMD | | | UCCAGUUUCAUUUAAUUGUUU | 1809 | |
| | | DMD | | | CUUAUGGGAGCACUUACAAGC | 1810 | |
| | | DMD | | | UUGCUUCAUUACCUUCACUGG | 1811 | |
| | | DMD | | | UUGUGUCACCAGAGUAACAGU | 1812 | |
| | | DMD | | | AGUAACCACAGGUUGUGUCAC | 1813 | |
| | | DMD | | | UUCAAAUUUUGGGCAGCGGUA | 1814 | |
| | | DMD | | | CAAGAGGCUAGAACAAUCAUU | 1815 | |
| | | DMD | | | UUGUACUUCAUCCCACUGAUU | 1816 | |
| | | DMD | | | CUUCAGAACCGGAGGCAACAG | 1817 | |
| | | DMD | | | CAACAGUUGAAUGAAAUGUUA | 1818 | |
| | | DMD | | | GCCAAGCUUGAGUCAUGGAAG | 1819 | |
| | | DMD | | | CUUGGUUUCUGUGAUUUUCUU | 1820 | |
| | | DMD | | | UCAUUUCACAGGCCUUCAAGA | 1821 | |
| | | DMD | | | CAGAAAUAUUCGUACAGUCUC | 1822 | |
| | | DMD | | | CAAUUACCUCUGGGCUCCUGG | 1823 | |
| | | DMD | | | GATACTAGGGTGGCAAATAG | 1824 | |
| | | DMD | | | GTGTTCTTAAAAGAATGGTG | 1825 | |
| | | DMD | | | GTCAAGAACAGCTGCAGAAC | 1826 | |
| | | DMD | | | GCAGTTGAATGAAATGTTAA | 1827 | |
| | | DMD | | | GATACTAGTGTGGCTCATAG | 1828 | |
| | | DMD | | | GATACGATGGTGGCAAATCG | 1829 | |
| | | DMD | | | GATACTAGGGTGGGGAATAA | 1830 | |
| | | DMD | | | TTTTTCTTAAAAGAATGGTA | 1831 | |
| | | DMD | | | TTGATCTTAGAAGAATGGTG | 1832 | |
| | | DMD | | | GTTTTCTTGAAAAAATGGTG | 1833 | |
| | | DMD | | | CTGTTCTTAAAAGGTTGGTG | 1834 | |
| | | DMD | | | GAGTTCTTCAAAGAATAGTG | 1835 | |
| | | DMD | | | TCTAGGGCAGCTGCAGAAC | 1836 | |
| | | DMD | | | TCATTCACAGCTGCAGAAC | 1837 | |
| | | DMD | | | CAAAGAATAGCTGCAGAAC | 1838 | |
| | | DMD | | | TCAAGAACAGCTGCAGCAG | 1839 | |
| | | DMD | | | TCAAGAACAGCTGCATCAC | 1840 | |
| | | DMD | | | CAGTTACATGAAATGTTAA | 1841 | |
| | | DMD | | | CATTTTAATGAAATGTTAA | 1842 | |
| | | DMD | | | AAGTTGAATGAAATTTTAA | 1843 | |
| | | DMD | | | CAGTGGAATAAAATGTTAA | 1844 | |
| | | DMD | | | AAAGATATATAATGTCATGAAT | 1845 | |
| | | DMD | | | GCAGAATCAAATATAATAGTCT | 1846 | |
| | | DMD | | | AACAAATATCCCTTAGTATC | 1847 | |
| | | DMD | | | AATGTATTTCTTCTATTCAA | 1848 | |
| | | DMD | | | AACAATAAGTCAAATTTAATTG | 1849 | |
| | | DMD | | | GAACTGGTGGGAAATGGTCTA | 1850 | |
| | | | | | G | | |
| | | DMD | | | TCCTTTGGTAAATAAAAGTCCT | 1851 | |
| | | DMD | | | TAGGAATCAAATGGACTTGGAT | 1852 | |
| | | DMD | | | TAATTCTTTCTAGAAAGAGCCT | 1853 | |
| | | DMD | | | CTCTTGCATCTTGCACATGTCC | 1854 | |
| | | DMD | | | ACTTAGAGGTCTTCTACATACA | 1855 | |
| | | DMD | | | TCAGAGGTGAGTGGTGAGGGG | 1856 | |
| | | | | | A | | |
| | | DMD | | | ACACACAGCTGGGTTATCAGA | 1857 | |
| | | | | | G | | |
| | | DMD | | | CACAGCTGGGTTATCAGAG | 1858 | |
| | | DMD | | | ACACAGCTGGGTTATCAGAG | 1859 | |
| | | DMD | | | CACACAGCTGGGTTATCAGAG | 1860 | |
| | | DMD | | | AACACACAGCTGGGTTATCAG | 1861 | |
| | | | | | AG | | |
| | | DMD | | | CTGSTGGGARATGGTCTAG | 1862 | |
| | | DMD | | | ACTGGTGGGAAATGGTCTAG | 1863 | |
| | | DMD | | | AACTGGTGGGAAATGGTCTAG | 1864 | |
| | | DMD | | | AGAACTGGTGGGAAATGGTCT | 1865 | |
| | | | | | AG | | |
| | | DMD | | | ATATCTTCTTAAATACCCGA | 1866 | |
| | | DMD | | | AGTCTCACAAAACTGCAGAG | 1867 | |
| | | DMD | | | TACTTATGTATTTTAAAAAC | 1868 | |
| | | DMD | | | GAATAATTTCTATTATATTACA | 1869 | |
| | | DMD | | | TTCGAAAATTTCAGGTAAGCCG | 1870 | |
| | | DMD | | | TCATTTCTAAAAGTCTTTTGCC | 1871 | |
| | | DMD | | | TTTGAGACACAGTATAGGTTAT | 1872 | |
| | | DMD | | | ATATAATAGAAATTATTCAT | 1873 | |
| | | DMD | | | TAATATGCCCTGTAATATAA | 1874 | |
| | | DMD | | | TGATATCATCAATATCTTTG | 1875 | |
| | | DMD | | | GCAATTAATTGGAAAATGTG | 1876 | |
| | | DMD | | | CTTTAAGCTTAGGTAAAATCA | 1877 | |
| | | DMD | | | CAGTAATGTGTCATACCTTC | 1878 | |
| | | DMD | | | CAGGGCATATTATATTTAGA | 1879 | |
| | | DMD | | | CAAAAGCCAAATCTATTTCA | 1880 | |
| | | DMD | | | ATGCTTTGGTGGGAAGAAGTA | 1881 | |
| | | | | | GAGGA | | |
| | | DMD | | | ATGCTTTGGTGGGAAGAATAG | 1882 | |
| | | | | | AGGAC | | |
| | | DMD | | | TTGTGACAAGCTCACTAATTAG | 1883 | |
| | | | | | G | | |
| | | DMD | | | AAGTTTGAAGAACTTTTACCAG | 1884 | |
| | | | | | G | | |
| | | DMD | | | AGGCAGCGATAAAAAAAACCT | 1885 | |
| | | | | | GG | | |
| | | DMD | | | GCTTTGGTGGGAAGAAGTAGA | 1886 | |
| | | | | | GG | | |
| | | DMD | | | GCTGGGTGTCCCATTGAAA | 1887 | |
| | | DMD | | | CAGCCGCTCGCTGCAGCAG | 1888 | |
| | | DMD | | | TGGAGAGTTTGCAAGGAGC | 1889 | |
| | | DMD | | | GTTTATTCAGCCGGGAGTC | 1890 | |
| | | DMD | | | CGCCAGGAGGGGTGGGTCTA | 1891 | |
| | | DMD | | | CCTTGGTGAGACTGGTAGA | 1892 | |
| | | DMD | | | GTCTTCAGGTTCTGTTGCT | 1893 | |
| | | DMD | | | ATATTCCTGATTTAAAAGT | 1894 | |
| | | DMD | | | TTAAAAGTCGGCTGGTAGC | 1895 | |
| | | DMD | | | CGGGCCGGGGGCGGGGTCC | 1896 | |
| | | DMD | | | GCCCGAGCCGCGTGTGGAA | 1897 | |
| | | DMD | | | CCTTCATTGCGGCGGGCTG | 1898 | |
| | | DMD | | | CCGACCCCTCCCGGGTCCC | 1899 | |
| | | DMD | | | CAGGACCGCGCTTCCCACG | 1900 | |
| | | DMD | | | TGCACCCTGGGAGCGCGAG | 1901 | |
| | | DMD | | | CCGCACGCACCTGTTCCCA | 1902 | |
| | | DMD | | | AAAACAGCGAGGGAGAAAC | 1903 | |
| | | DMD | | | TTAACTTGATTGTGAAATC | 1904 | |
| | | DMD | | | AAAACAATGCATATTTGCA | 1905 | |
| | | DMD | | | AAAATCCAGTATTTTAATG | 1906 | |
| | | DMD | | | ACCCAGCACTGCAGCCTGG | 1907 | |
| | | DMD | | | AACTTATGCGGCGTTTCCT | 1908 | |
| | | DMD | | | TCACTTTAAAACCACCTCT | 1909 | |
| | | DMD | | | GCATCTTTTTCTCTTTAAT | 1910 | |
| | | DMD | | | TGTACTCTCTGAGGTGCTC | 1911 | |
| | | DMD | | | ACGCAGATAAGAACCAGTT | 1912 | |
| | | DMD | | | CATCAAGTCAGCCATCAGC | 1913 | |
| | | DMD | | | GAGTCACCCTCCTGGAAAC | 1914 | |
| | | DMD | | | GCTAGGGATGAAGAATAAA | 1915 | |
| | | DMD | | | TTGACCAATAGCCTTGACA | 1916 | |
| | | DMD | | | TGCAAATATCTGTCTGAAA | 1917 | |
| | | DMD | | | AAATTAGCAGTATCCTCTT | 1918 | |
| | | DMD | | | CCTGGGCTCCGGGGCGTTT | 1919 | |
| | | DMD | | | GGCCCCTGCGGCCACCCCG | 1920 | |
| | | DMD | | | CTCCCTCCCTGCCCGGTAG | 1921 | |
| | | DMD | | | AGGTTTGGAAAGGGCGTGC | 1922 | |
| | | DMD | | | GATTGGCTTTGATTTCCCTA | 1923 | |
| | | DMD | | | GTGTAGAGTAAGTCAGCCTATG | 1924 | |
| | | | | | G | | |
| | | DMD | | | GCCTACTCAGACTGTTACTC | 1925 | |
| | | DMD | | | GTTGGACAGAACTTACCGACTG | 1926 | |
| | | | | | G | | |
| | | DMD | | | GCAGTTGCCTAAGAACTGGT | 1927 | |
| | | DMD | | | GGGGCTCCACCCTCACGAGT | 1928 | |
| | | DMD | | | GTTTGCTTCGCTATAAAACGAG | 1929 | |
| | | | | | G | | |
| | | DMD | | | GTCTGAGGATGGGGCCGCAAT | 1930 | |
| | | | | | GG | | |
| | | DMD | | | GGATCTGTCAAATCGCCTGCAG | 1931 | |
| | | | | | G | | |
| | | DMD | | | GCCAGGATGGCATTGGGCAGC | 1932 | |
| | | | | | GG | | |
| | | DMD | | | GCTGAATCTGCGGTGGCAGGA | 1933 | |
| | | | | | GG | | |
| | | DMD | | | GTTCTTTTGTTCTTCTAGCCTGG | 1934 | |
| | | DMD | | | GGAAAAGCTTGAGCAAGTCAA | 1935 | |
| | | | | | GG | | |
| | | DMD | | | GGAAGAGTTGCCCCTGCGCCA | 1936 | |
| | | | | | GG | | |
| | | DMD | | | GACAAATCTCCAGTGGATAAA | 1937 | |
| | | | | | GG | | |
| | | DMD | | | GTGTTTCTCAGGTAAAGCTCTG | 1938 | |
| | | | | | G | | |
| | | DMD | | | GGAAGGACCATTTGACGTTAA | 1939 | |
| | | | | | GG | | |
| | | DMD | | | GAACTGCTATTTCAGTTTCCTG | 1940 | |
| | | | | | G | | |
| | | DMD | | | GCCAGCCACTCAGCCAGTGAA | 1941 | |
| | | | | | GG | | |
| | | DMD | | | GGTATGCTTTTCTGTTAAAGAG | 1942 | |
| | | | | | G | | |
| | | DMD | | | GCTCCTGGACTGACCACTATTG | 1943 | |
| | | | | | G | | |
| | | DMD | | | GGAACAGAGGCGTCCCCAGTT | 1944 | |
| | | | | | GG | | |
| | | DMD | | | GGAGGCTAGAACAATCATTAC | 1945 | |
| | | | | | GG | | |
| | | DMD | | | GACAAGAACACCTTCAGAACC | 1946 | |
| | | | | | GG | | |
| | | DMD | | | GGGTTTCTGTGATTTTCTTTTGG | 1947 | |
| | | DMD | | | GGGCCAAAGACCTCCGCCAGT | 1948 | |
| | | | | | GG | | |
| | | DMD | | | GTTGGAGAAGCATTCATAAAA | 1949 | |
| | | | | | GG | | |
| | | DMD | | | GTCGCTCACTCACCCTGCAAAG | 1950 | |
| | | | | | G | | |
| | | DMD | | | GAAAAGAGCTGATGAAACAAT | 1951 | |
| | | | | | GG | | |
| | | DMD | | | GTACACTTTTCAAAATGCTTTG | 1952 | |
| | | | | | G | | |
| | | DMD | | | GGAGATGATCATCAAGCAGAA | 1953 | |
| | | | | | GG | | |
| | | DMD | | | GCTTTGAAAGAGCAATAAAAT | 1954 | |
| | | | | | GG | | |
| | | DMD | | | GCACAAAAGTCAAATCGGAAT | 1955 | |
| | | | | | GG | | |
| | | DMD | | | GATTTCAATATAAGATTCGGAG | 1956 | |
| | | | | | G | | |
| | | DMD | | | GCTTAAGCAATCCCGAACTCTG | 1957 | |
| | | | | | G | | |
| | | DMD | | | GCCTTCTTTATCCCCTATCG | 1958 | |
| | | DMD | | | GAGGCCAAACCTCGGCTTACN | 1959 | |
| | | | | | NGRR | | |
| | | DMD | | | GTTCGAAAATTTCAGGTAAGNN | 1960 | |
| | | | | | GRR | | |
| | | DMD | | | GGCAGAACAGGAGATAACAGN | 1961 | |
| | | | | | NGRRT | | |
| | | DMD | | | GGCGGCCCTCGCCCTTCTCTGG | 1962 | |
| | | | | | GGAT | | |
| | | DMD | | | GTAGTGATCGTGGATACGAGA | 1963 | |
| | | | | | GG | | |
| | | DMD | | | GTACAGCCCTCGGTGTATATTG | 1964 | |
| | | | | | G | | |
| | | DMD | | | GGGAAGGAATTAAGCCCGAAT | 1965 | |
| | | | | | GG | | |
| | | DMD | | | GGGAACAGCTTTCGTAGTTGAG | 1966 | |
| | | | | | G | | |
| | | DMD | | | GATAAAGTCCAGTGTCGATCAG | 1967 | |
| | | | | | G | | |
| | | DMD | | | GAAAACCAGAGCTTCGGTCAA | 1968 | |
| | | | | | GG | | |
| | | DMD | | | GGAGTCTTCTGGGCAGGCTTAA | 1969 | |
| | | | | | AGGCTAACCTGG | | |
| | | DMD | | | GTCGGGTGAGCATGTCTTTAAT | 1970 | |
| | | | | | CTACCTCGATGG | | |
| | | DMD | | | GGTGTCACCAGAGTAACAGTCT | 1971 | |
| | | | | | GAGT | | |
| | | DMD | | | GTGATCATCAAGCAGAAGGTA | 1972 | |
| | | | | | TGAG | | |
| | | DMD | | | GAACTTCGAAAATTTCAGGTAA | 1973 | |
| | | | | | GCCGAGG | | |
| | | DMD | | | GGAAACTCATCAAATATGCGTG | 1974 | |
| | | | | | TTAGTGT | | |
| | | DMD | | | GTCATTTACACTAACACGCATA | 1975 | |
| | | | | | TTTGATG | | |
| | | DMD | | | GGAATGAAACTCATCAAATAT | 1976 | |
| | | | | | GCGTGTTA | | |
| | | DMD | | | GTCATCAATATCTTTGAAGGAC | 1977 | |
| | | | | | TCTGGGT | | |
| | | DMD | | | GTGTTTTCATAGGAAAAATAGG | 1978 | |
| | | | | | CAAGTTG | | |
| | | DMD | | | GAATTGGAAAATGTGATGGGA | 1979 | |
| | | | | | AACAGATA | | |
| | | DMD | | | GATGATCATCAAGCAGAAGGT | 1980 | |
| | | | | | ATGAGAAA | | |
| | | DMD | | | GAGATGATCATCAAGCAGAAG | 1981 | |
| | | | | | GTATGAGA | | |
| | | DMD | | | GCATTTTTTCTCATACCTTCTGC | 1982 | |
| | | | | | TTGATG | | |
| | | DMD | | | GTCCTACTCAGACTGTTACTCT | 1983 | |
| | | | | | GGTGACA | | |
| | | DMD | | | GACAGGTTGTGTCACCAGAGTA | 1984 | |
| | | | | | ACAGTCT | | |
| | | DMD | | | GTTATCATTTTTTCTCATACCTT | 1985 | |
| | | | | | CTGCTT | | |
| | | DMD | | | GTTGCCTAAGAACTGGTGGGA | 1986 | |
| | | | | | AATGGTCT | | |
| | | DMD | | | GAAACAGTTGCCTAAGAACTG | 1987 | |
| | | | | | GTGGGAAA | | |
| | | DMD | | | GTTTCCCACCAGTTCTTAGGCA | 1988 | |
| | | | | | ACTGTTT | | |
| | | DMD | | | GTGGCTTTGATTTCCCTAGGGT | 1989 | |
| | | | | | CCAGCTT | | |
| | | DMD | | | GTAGGGAAATCAAAGCCAATG | 1990 | |
| | | | | | AAACGTTC | | |
| | | DMD | | | GGACCCTAGGGAAATCAAAGC | 1991 | |
| | | | | | CAATGAAA | | |
| | | DMD | | | GTGAGGGCTCCACCCTCACGAG | 1992 | |
| | | | | | TGGGTTT | | |
| | | DMD | | | GAAGGATTGAGGGCTCCACCCT | 1993 | |
| | | | | | CACGAGT | | |
| | | DMD | | | GGCTCCACCCTCACGAGTGGGT | 1994 | |
| | | | | | TTGGTTC | | |
| | | DMD | | | GTATCCCCTATCGAGGAAACCA | 1995 | |
| | | | | | CGAGTTT | | |
| | | DMD | | | GGATAAAGAAGGCCTATTTCAT | 1996 | |
| | | | | | AGAGTTG | | |
| | | DMD | | | GAGGCCTTCTTTATCCCCTATC | 1997 | |
| | | | | | GAGGAAA | | |
| | | DMD | | | GTGAGGGCTCCACCCTCACGAG | 1998 | |
| | | | | | TGGGT | | |
| | | DMD | | | GGATAAAGAAGGCCTATTTCAT | 1999 | |
| | | | | | AGAGT | | |
| | | DMD | | | CACCGCAGCCGCTCGCTGCAGC | 2000 | |
| | | | | | AG | | |
| | | DMD | | | AAACCTGCTGCAGCGAGCGGC | 2001 | |
| | | | | | TGC | | |
| | | DMD | | | CACCGGCTGGGTGTCCCATTGA | 2002 | |
| | | | | | AA | | |
| | | DMD | | | AAACTTTCAATGGGACACCCAG | 2003 | |
| | | | | | CC | | |
| | | DMD | | | CACCGGTTTATTCAGCCGGGAG | 2004 | |
| | | | | | TC | | |
| | | DMD | | | AAACGACTCCCGGCTGAATAA | 2005 | |
| | | | | | ACC | | |
| | | DMD | | | CACCGTGGAGAGTTTGCAAGG | 2006 | |
| | | | | | AGC | | |
| | | DMD | | | AAACGCTCCTTGCAAACTCTCC | 2007 | |
| | | | | | AC | | |
| | | DMD | | | CACCGCCCTCCAGACTTTCCAC | 2008 | |
| | | | | | CT | | |
| | | DMD | | | AAACAGGTGGAAAGTCTGGAG | 2009 | |
| | | | | | GGC | | |
| | | DMD | | | CACCGAATTTTCTTCCAAGTTC | 2010 | |
| | | | | | TC | | |
| | | DMD | | | AAACGAGAACTTGGAAGAAAA | 2011 | |
| | | | | | TTC | | |
| | | DMD | | | CACCGCTGCGGAGAGAAGAAA | 2012 | |
| | | | | | GGG | | |
| | | DMD | | | AAACCCCTTTCTTCTCTCCGCA | 2013 | |
| | | | | | GC | | |
| | | DMD | | | CACCGAGAGCCACCCCCTGGCT | 2014 | |
| | | | | | CC | | |
| | | DMD | | | AAACGGAGCCAGGGGGTGGCT | 2015 | |
| | | | | | CTC | | |
| | | DMD | | | CACCGCGAAGCCAACCGCGGC | 2016 | |
| | | | | | GGG | | |
| | | DMD | | | AAACCCCGCCGCGGTTGGCTTC | 2017 | |
| | | | | | GC | | |
| | | DMD | | | CACCGAGAGGGAAGACGATCG | 2018 | |
| | | | | | CCC | | |
| | | DMD | | | AAACGGGCGATCGTCTTCCCTC | 2019 | |
| | | | | | TC | | |
| | | DMD | | | CACCGCCCCTTTAACTTTCCTC | 2020 | |
| | | | | | CG | | |
| | | DMD | | | AAACCGGAGGAAAGTTAAAGG | 2021 | |
| | | | | | GGC | | |
| | | DMD | | | CACCGGCAGCCCCGCTTCCTTC | 2022 | |
| | | | | | AA | | |
| | | DMD | | | AAACTTGAAGGAAGCGGGGCT | 2023 | |
| | | | | | GCC | | |
| | | DMD | | | CACCGCGAGAGCGAGAGGAGG | 2024 | |
| | | | | | GAG | | |
| | | DMD | | | AAACCTCCCTCCTCTCGCTCTC | 2025 | |
| | | | | | GC | | |
| | | DMD | | | CACCGGAGAGAGCTTGAGAGC | 2026 | |
| | | | | | GCG | | |
| | | DMD | | | AAACCGCGCTCTCAAGCTCTCT | 2027 | |
| | | | | | CC | | |
| | | DMD | | | CACCGGGTGGAGGGGGCGGGG | 2028 | |
| | | | | | CCC | | |
| | | DMD | | | AAACGGGCCCCGCCCCCTCCAC | 2029 | |
| | | | | | CC | | |
| | | DMD | | | CACCGGGTATCCACGTAAATCA | 2030 | |
| | | | | | AA | | |
| | | DMD | | | AAACTTTGATTTACGTGGATAC | 2031 | |
| | | | | | CC | | |
| | | DMD | | | CACCGCCAATCACTGGCTCCGG | 2032 | |
| | | | | | TC | | |
| | | DMD | | | AAACGACCGGAGCCAGTGATT | 2033 | |
| | | | | | GGC | | |
| | | DMD | | | CACCGGGCGCCCGAGGGAAGA | 2034 | |
| | | | | | AGA | | |
| | | DMD | | | AAACTCTTCTTCCCTCGGGCGC | 2035 | |
| | | | | | CC | | |
| | | DMD | | | CACCGGGGTGGGGGTACCAGA | 2036 | |
| | | | | | GGA | | |
| | | DMD | | | AAACTCCTCTGGTACCCCCACC | 2037 | |
| | | | | | CC | | |
| | | DMD | | | CACCGCCGGGGACAGAAGAGA | 2038 | |
| | | | | | GGG | | |
| | | DMD | | | AAACCCCTCTCTTCTGTCCCCG | 2039 | |
| | | | | | GC | | |
| | | DMD | | | CACCGGAGAGAGAGTGGGAGA | 2040 | |
| | | | | | AGC | | |
| | | DMD | | | AAACGCTTCTCCCACTCTCTCT | 2041 | |
| | | | | | CC | | |
| | | DMD | | | CACCGAAAGTAACTGTCAAAT | 2042 | |
| | | | | | GCG | | |
| | | DMD | | | AAACCGCATTTGACAGTTACTT | 2043 | |
| | | | | | TC | | |
| | | DMD | | | CACCGTTAACCAGAGCGCCCA | 2044 | |
| | | | | | GTC | | |
| | | DMD | | | AAACGACTGGGCGCTCTGGTTA | 2045 | |
| | | | | | AC | | |
| | | DMD | | | CACCGCGTCGGAGCTGCCCGCT | 2046 | |
| | | | | | AG | | |
| | | DMD | | | AAACCTAGCGGGCAGCTCCGA | 2047 | |
| | | | | | CGC | | |
| | | DMD | | | TGTACTCTCTGAGGTGCTC | 2048 | |
| | | DMD | | | ACGCAGATAAGAACCAGTT | 2049 | |
| | | DMD | | | CATCAAGTCAGCCATCAGC | 2050 | |
| | | DMD | | | GAGTCACCCTCCTGGAAAC | 2051 | |
| | | DMD | | | CCTGGGCTCCGGGGCGTTT | 2052 | |
| | | DMD | | | GGCCCCTGCGGCCACCCCG | 2053 | |
| | | DMD | | | CTCCCTCCCTGCCCGGTAG | 2054 | |
| | | DMD | | | AGGTTTGGAAAGGGCGTGC | 2055 | |
| | | DMD | | | ACTCCACTGCACTCCAGTCT | 2056 | |
| | | DMD | | | TCTGTGGGGGACCTGCACTG | 2057 | |
| | | DMD | | | GGGGCGCCAGTTGTGTCTCC | 2058 | |
| | | DMD | | | ACACCATTGCCACCACCATT | 2059 | |
| | | DMD | | | CAATGACCCCTTCATTGACC | 2060 | |
| | | DMD | | | TTGATTTTGGAGGGATCTCG | 2061 | |
| | | DMD | | | GGAATCCATGGAGGGAAGAT | 2062 | |
| | | DMD | | | TGTTCTCGCTCAGGTCAGTG | 2063 | |
| | | DMD | | | CTCTCTGCTCCTTTGCCACA | 2064 | |
| | | DMD | | | GTGCTCTTCGGGTTTCAGGA | 2065 | |
| | | DMD | | | CGAAAGAGAAAGCGAACCAGT | 2066 | |
| | | | | | ATCGAGAAC | | |
| | | DMD | | | CGTTGTGCATAGTCGCTGCTTG | 2067 | |
| | | | | | ATCGC | | |
| | | DMD | | | UAGAAGAUCUGAGCUCUGAG | 2068 | |
| | | DMD | | | AGAUCUGAGCUCUGAGUGGA | 2069 | |
| | | DMD | | | UCUGAGCUCUGAGUGGAAGG | 2070 | |
| | | DMD | | | CCGUUUACUUCAAGAGCUGA | 2071 | |
| | | DMD | | | AAGCAGCCUGACCUAGCUCC | 2072 | |
| | | DMD | | | GCUCCUGGACUGACCACUAU | 2073 | |
| | | DMD | | | CCCUCAGCUCUUGAAGUAAA | 2074 | |
| | | DMD | | | GUCAGUCCAGGAGCUAGGUC | 2075 | |
| | | DMD | | | UAGUGGUCAGUCCAGGAGCU | 2076 | |
| | | DMD | | | GCUCCAAUAGUGGUCAGUCC | 2077 | |
| | | DMD | | | UGGCCAAAGACCUCCGCCAG | 2078 | |
| | | DMD | | | GUGGCAGACAAAUGUAGAUG | 2079 | |
| | | DMD | | | UGUAGAUGUGGCAAAUGACU | 2080 | |
| | | DMD | | | CUUGGCCCUGAAACUUCUCC | 2081 | |
| | | DMD | | | CAGAGAAUAUCAAUGCCUCU | 2082 | |
| | | DMD | | | CAGAGAAUAUCAAUGCCUCU | 2083 | |
| | | DMD | | | CAUUUGUCUGCCACUGGCGG | 2084 | |
| | | DMD | | | CUACAUUUGUCUGCCACUGG | 2085 | |
| | | DMD | | | CAUCUACAUUUGUCUGCCAC | 2086 | |
| | | DMD | | | AUAAUCCCGGAGAAGUUUCA | 2087 | |
| | | DMD | | | UAUCAUCUGCAGAAUAAUCC | 2088 | |
| | | DMD | | | UGUUAUCAUGUGGACUUUUC | 2089 | |
| | | DMD | | | UGAUAUAUCAUUUCUCUGUG | 2090 | |
| | | DMD | | | UUUAUGAAUGCUUCUCCAAG | 2091 | |
| | | DMD | | | UUCUCCAGGCUAGAAGAACAA | 2092 | |
| | | DMD | | | CUGCUCUUUUCCAGGUUCAAG | 2093 | |
| | | DMD | | | GUCUGUUUCAGUUACUGGUGG | 2094 | |
| | | DMD | | | UCCAGUUUCAUUUAAUUGUUU | 2095 | |
| | | DMD | | | CUUAUGGGAGCACUUACAAGC | 2096 | |
| | | DMD | | | UUGCUUCAUUACCUUCACUGG | 2097 | |
| | | DMD | | | UUGUGUCACCAGAGUAACAGU | 2098 | |
| | | DMD | | | AGUAACCACAGGUUGUGUCAC | 2099 | |
| | | DMD | | | UUCAAAUUUUGGGCAGCGGUA | 2100 | |
| | | DMD | | | CAAGAGGCUAGAACAAUCAUU | 2101 | |
| | | DMD | | | UUGUACUUCAUCCCACUGAUU | 2102 | |
| | | DMD | | | CUUCAGAACCGGAGGCAACAG | 2103 | |
| | | DMD | | | CAACAGUUGAAUGAAAUGUUA | 2104 | |
| | | DMD | | | GCCAAGCUUGAGUCAUGGAAG | 2105 | |
| | | DMD | | | CUUGGUUUCUGUGAUUUUCUU | 2106 | |
| | | DMD | | | UCAUUUCACAGGCCUUCAAGA | 2107 | |
| | | DMD | | | CAGAAAUAUUCGUACAGUCUC | 2108 | |
| | | DMD | | | CAAUUACCUCUGGGCUCCUGG | 2109 | |
| | | DMD | | | GAACUUCUAUUUAAUUUUG | 2110 | |
| | | DMD | | | AUUUCAGGUAAGCCGAGGUU | 2111 | |
| | | DMD | | | UCUUAAUAAUGUUUCACUGU | 2112 | |
| | | DMD | | | AUAAUUUCUAUUAUAUUACA | 2113 | |
| | | DMD | | | UUUCAUUCAUAUCAAGAAGA | 2114 | |
| | | DMD | | | AUAGUUUAAAGGCCAAACCU | 2115 | |
| | | DMD | | | UGUGAAAAAAUAUAGUUUAA | 2116 | |
| | | DMD | | | CGAAAAUUUCAGGUAAGCCG | 2117 | |
| | | DMD | | | CAAAAACCCAAAATATTTTAGC | 2118 | |
| | | | | | T | | |
| | | DMD | | | CCTTTTTGGTATCTTACAGGAA | 2119 | |
| | | | | | C | | |
| | | DMD | | | CCGCTGCCCAATGCCATCCTGG | 2120 | |
| | | | | | A | | |
| | | DMD | | | TTTTTCCTTTTATTCTAGTTGAA | 2121 | |
| | | DMD | | | TTGATCCATATGCTTTTACCTG | 2122 | |
| | | | | | C | | |
| | | DMD | | | TCAACAGATCTGTCAAATCGCC | 2123 | |
| | | | | | T | | |
| | | DMD | | | TTCTTCTTTCTCCAGGCTAGAA | 2124 | |
| | | | | | G | | |
| | | DMD | | | GTTCTTCTAGCCTGGAGAAAGA | 2125 | |
| | | | | | A | | |
| | | DMD | | | CAAATCCTGCATTGTTGCCTGT | 2126 | |
| | | | | | A | | |
| | | DMD | | | CTGTTAAAGAGGAAGTTAGAA | 2127 | |
| | | | | | GA | | |
| | | DMD | | | AAAATTTTTATATTACAGAATA | 2128 | |
| | | | | | T | | |
| | | DMD | | | TTGTAGACTATCTTTTATATTCT | 2129 | |
| | | DMD | | | TTTTGCATTTTAGATGAAAGAG | 2130 | |
| | | | | | A | | |
| | | DMD | | | AACATCTTCTCTTTCATCTAAA | 2131 | |
| | | | | | A | | |
| | | DMD | | | TTTTGAACATCTTCTCTTTCATC | 2132 | |
| | | DMD | | | CAAAAACCCAAAATATTTTAGC | 2133 | |
| | | | | | T | | |
| | | DMD | | | GCTTGTGTTTCTAATTTTTCTTT | 2134 | |
| | | DMD | | | ACTTATTGTTATTGAAATTGGC | 2135 | |
| | | | | | T | | |
| | | DMD | | | TACCATGTATTGCTAAACAAAG | 2136 | |
| | | | | | T | | |
| | | DMD | | | GTATCAATTCACACCAGCAAGT | 2137 | |
| | | | | | T | | |
| | | DMD | | | CTCCTCTGTAAAGTGGCGATTA | 2138 | |
| | | | | | T | | |
| | | DMD | | | TTTAAAATGAAGATTTTCCACC | 2139 | |
| | | | | | A | | |
| | | DMD | | | AAATGAAGATTTTCCACCAATC | 2140 | |
| | | | | | A | | |
| | | DMD | | | CCACCAATCACTTTACTCTCCT | 2141 | |
| | | | | | A | | |
| | | DMD | | | CCACCAGTTCTTAGGCAACTGT | 2142 | |
| | | | | | T | | |
| | | DMD | | | CATTAATTTATATCCTTGATTAT | 2143 | |
| | | DMD | | | GTTGTTGTTGTTAAGGTCAAAG | 2144 | |
| | | | | | T | | |
| | | DMD | | | AAATTACCCTAGATCTTAAAGT | 2145 | |
| | | | | | T | | |
| | | DMD | | | GCCTCTGATTAGGGTGGGGGCG | 2146 | |
| | | | | | TG | | |
| | | DMD | | | TCACAGGCTCCAGGAAGGGTTT | 2147 | |
| | | | | | GG | | |
| | | DMD | | | CCCAGGGGGGCCTCTTTCGGAA | 2148 | |
| | | | | | GG | | |
| | | DMD | | | GGAAGGCTCTCTTGGTGATGGA | 2149 | |
| | | | | | GA | | |
| | | DMD | | | AAGCTAGTCTAGTGCAAGCTAA | 2150 | |
| | | | | | CA | | |
| | | DMD | | | CTGGCCTATGTTATTACCTGTA | 2151 | |
| | | | | | TG | | |
| | | DMD | | | TGGCCTATGTTATTACCTGTAT | 2152 | |
| | | | | | GG | | |
| | | DMD | | | TTCCATTCTAATGGGTGGCTGT | 2153 | |
| | | | | | T | | |
| | | DMD | | | CTCCTCTGTAAAGTGGCGAT | 2154 | |
| | | DMD | | | TTCCATTCTAATGGGTGGCT | 2155 | |
| | | DMD | | | GTATCAATTCACACCAGCAA | 2156 | |
| | | DMD | | | TACCATGTATTGCTAAACAA | 2157 | |
| | | DMD | | | ACTTATTGTTATTGAAATTG | 2158 | |
| | | DMD | | | GCTTGTGTTTCTAATTTTTC | 2159 | |
| | | DMD | | | CAAAAACCCAAAATATTTTA | 2160 | |
| | | DMD | | | TTTAAAATGAAGATTTTCCA | 2161 | |
| | | DMD | | | AAATGAAGATTTTCCACCAA | 2162 | |
| | | DMD | | | CCACCAATCACTTTACTCTC | 2163 | |
| | | DMD | | | CCACCAGTTCTTAGGCAACT | 2164 | |
| | | DMD | | | CATTAATTTATATCCTTGAT | 2165 | |
| | | DMD | | | AGTTATAGCTCTCTTTCAAT | 2166 | |
| | | DMD | | | ATGTATAACAATTCCAACAT | 2167 | |
| | | DMD | | | AAATTACCCTAGATCTTAAA | 2168 | |
| | | DMD | | | GTTGTTGTTGTTAAGGTCAA | 2169 | |
| | | DMD | | | GCTTGTGTTTCTAATTTTTC | 2170 | |
| | | DMD | | | TAATTTTTCTTTTTCTTCTT | 2171 | |
| | | DMD | | | GCAAAAAGGAAAAAAGAAGA | 2172 | |
| | | DMD | | | GGGTTTTTGCAAAAAGGAAA | 2173 | |
| | | DMD | | | AGCTCCTACTCAGACTGTTA | 2174 | |
| | | DMD | | | TGCAAAAACCCAAAATATTT | 2175 | |
| | | DMD | | | TGTCACCAGAGTAACAGTCT | 2176 | |
| | | DMD | | | CTTAGTAACCACAGGTTGTG | 2177 | |
| | | DMD | | | TAGTTTGGAGATGGCAGTTT | 2178 | |
| | | DMD | | | GAGATGGCAGTTTCCTTAGT | 2179 | |
| | | DMD | | | CTTGATGTTGGAGGTACCTG | 2180 | |
| | | DMD | | | ATGTTGGAGGTACCTGCTCT | 2181 | |
| | | DMD | | | TAACTTGATCAAGCAGAGAA | 2182 | |
| | | DMD | | | TCTGCTTGATCAAGTTATAA | 2183 | |
| | | DMD | | | TAAAATCACAGAGGGTGATG | 2184 | |
| | | DMD | | | ATATCCTCAAGGTCACCCAC | 2185 | |
| | | DMD | | | ATGATCATCTCGTTGATATC | 2186 | |
| | | DMD | | | TCATACCTTCTGCTTGATGA | 2187 | |
| | | DMD | | | TCATTTTTTCTCATACCTTC | 2188 | |
| | | DMD | | | TGCCAACTTTTATCATTTTT | 2189 | |
| | | DMD | | | AATCAGAAAGAAGATCTTAT | 2190 | |
| | | DMD | | | ATTTCCCTAGGGTCCAGCTT | 2191 | |
| | | DMD | | | GCTCAAATTGTTACTCTTCA | 2192 | |
| | | DMD | | | AGCTCCTACTCAGACTGTTA | 2193 | |
| | | DMD | | | ATTCTAGTACTATGCATCTT | 2194 | |
| | | DMD | | | ACTTAAGTTACTTGTCCAGG | 2195 | |
| | | DMD | | | CCAAGGTCCCAGAGTTCCTA | 2196 | |
| | | DMD | | | TTTCCCTGGCAAGGTCTGAA | 2197 | |
| | | DMD | | | GCTCATTCTCATGCCTGGAC | 2198 | |
| | | DMD | | | TTTAGCAATACATGGTAGAA | 2199 | |
| | | DMD | | | AGCCAAACTCTTATTCATGA | 2200 | |
| | | DMD | | | TAACAATGTGGATACTTTGT | 2201 | |
| | | DMD | | | GUGUUAUUACUUGCUACUGCA | 2202 | |
| | | DMD | | | GUGUAUUGCUUGUACUACUCA | 2203 | |
| | | DMD | | | GUUUAAAUGUAAAUAGCUCAG | 2204 | |
| | | DMD | | | GAAUUUUCAAUGAUGUUCUGG | 2205 | |
| | | | | | G | | |
| | | DMD | | | GAACUGGUGGGAAAUGGUCUA | 2206 | |
| | | | | | G | | |
| | | DMD | | | GUUUCAUUGGCUUUGAUUUCC | 2207 | |
| | | | | | C | | |
| | | DMD | | | GGCAAUUCUCCUGAAUAGAAA | 2208 | |
| | | DMD | | | GAUUAUACUUAGGCUGAAUAG | 2209 | |
| | | | | | U | | |
| | | DMD | | | GACUUCCAGAAUUAUGUGUUC | 2210 | |
| | | DMD | | | GUGAGGGCCUGACACAUGGUA | 2211 | |
| | | DMD | | | GUGAAGAUCAUUUCUUGGUAG | 2212 | |
| | | DMD | | | GCACAGUCAGAACUAGUGUGC | 2213 | |
| | | DMD | | | GAGUAAGCCCGAUCAUUAUUG | 2214 | |
| | | DMD | | | GGAAGGGACAUAUUCUAUGGG | 2215 | |
| | | DMD | | | GACCACAAGCUGACUUGGGGG | 2216 | |
| | | DMD | | | GGAUUUGUAUCCAUUAUCUGG | 2217 | |
| | | DMD | | | CUCUGCAUUGUUUUGGCCUC | 2218 | |
| | | DMD | | | UCCUCCAAAGAGUAGAAUGG | 2219 | |
| | | DMD | | | GCCCUAAACUUACACUGUUC | 2220 | |
| | | DMD | | | AAAGAUAGAUUAGAUUGUCC | 2221 | |
| | | DMD | | | GUUGCUAAAUUACAUAGUUU | 2222 | |
| | | DMD | | | UGUUGCAAUAGUCAAUCAAG | 2223 | |
| | | DMD | | | AUACUGAUUAAGACAGAUGA | 2224 | |
| | | DMD | | | AAUACUGAUUAAGACAGAUG | 2225 | |
| | | DMD | | | CUCUAUACAAAUGCCAACGC | 2226 | |
| | | DMD | | | ACUUGCAUGCACACCAGCGU | 2227 | |
| | | DMD | | | UUGGGCUAAUGUAGCAUAAU | 2228 | |
| | | DMD | | | GCGUUGGCAUUUGUAUAGAG | 2229 | |
| | | DMD | | | UGGGCUAAGUAGCAUAAUG | 2230 | |
| | | DMD | | | UUUGGGCUAAUGUAGCAUAA | 2231 | |
| | | DMD | | | GCUUAACUCCUUAAUAUUAA | 2232 | |
| | | DMD | | | UCUUCUAUAUUAAAGCAGAU | 2233 | |
| | | DMD | | | CUUCUAUAUUAAAGCAGAUU | 2234 | |
| | | DMD | | | AAUAUAUAACUACCUUGGGU | 2235 | |
| | | DMD | | | ACCUCCAUUCUACUCUUUGG | 2236 | |
| | | DMD | | | UUUCAAUGAUAUCCAACCCA | 2237 | |
| | | DMD | | | AGUACCUCCAUUCUACUCUU | 2238 | |
| | | DMD | | | CUAUCCUCCAAAGAGUAGAA | 2239 | |
| | | DMD | | | UUUUGCUACAUAUUUCAGGC | 2240 | |
| | | DMD | | | UUUGCUACAUAUUUCAGGCU | 2241 | |
| | | DMD | | | GGGUUGGAUAUCAUUGAAAA | 2242 | |
| | | DMD | | | AUAUUUCAGGCUGGGUUCU | 2243 | |
| | | DMD | | | UUGAAAUAUAUAACUACCUU | 2244 | |
| | | DMD | | | AUUGAAAUAUAUAACUACCU | 2245 | |
| | | DMD | | | GUGAGUAGUGGGGCACUUUA | 2246 | |
| | | DMD | | | UGUAUGUAGAAGGUUAACUA | 2247 | |
| | | DMD | | | GAGCCUAAUAAAUGUACAAU | 2248 | |
| | | DMD | | | UUGUAUGUAGAAGGUUAACU | 2249 | |
| | | DMD | | | CAAUUUGUUUUGAGUAACU | 2250 | |
| | | DMD | | | UGCCUUCUGAAAUAGUCCAG | 2251 | |
| | | DMD | | | GUUAAUAGGGAAACAGCAUA | 2252 | |
| | | DMD | | | AACAAUGCAGAGUUAAUUGU | 2253 | |
| | | DMD | | | GAACAUGUUGAGUAGACACA | 2254 | |
| | | DMD | | | UUUAUCAUCUGUGUCUAUUC | 2255 | |
| | | DMD | | | UCUUUACUUUCUUGACUAUA | 2256 | |
| | | DMD | | | AAUAUUCUCAAACCUCGUUC | 2257 | |
| | | DMD | | | AUUAACUGUGUUCCAGAACG | 2258 | |
| | | DMD | | | UAACUGCUUCUUUGGAUGAC | 2259 | |
| | | DMD | | | GACCAGAACAGUGUAAGUUU | 2260 | |
| | | DMD | | | ACCAGAACAGUGUAAGUUUA | 2261 | |
| | | DMD | | | CUACUUUUUCCCCACUACUG | 2262 | |
| | | DMD | | | UGGAACACAGUUAAUUCACU | 2263 | |
| | | DMD | | | GUGUUGUUUAACUGCUUCUU | 2264 | |
| | | DMD | | | AACUGUCAGUUGCAUAUUCC | 2265 | |
| | | DMD | | | CAGAAAGGAAUGCUGGUACC | 2266 | |
| | | DMD | | | UCUGCCUACACAAUGAAUGG | 2267 | |
| | | DMD | | | CACAGAUCAAUCCAAUUGUU | 2268 | |
| | | DMD | | | UUGACAGGUGGAAAGUACAU | 2269 | |
| | | DMD | | | ACAUUUUUAGGCUUGACAGG | 2270 | |
| | | DMD | | | CUCUCCCAUGACAGACUCCC | 2271 | |
| | | DMD | | | UUGGUAAGAGUUAUGAUAAG | 2272 | |
| | | DMD | | | AACACAAAUUAAGUUCACCU | 2273 | |
| | | DMD | | | AGGAUCAGUGCUGUAGUGCC | 2274 | |
| | | DMD | | | GGCCGUUUAUUAUUAUUGAC | 2275 | |
| | | DMD | | | UCUCAGGAUUGCUAUGCAAC | 2276 | |
| | | DMD | | | CAGGAAGACAUACCAUGUAA | 2277 | |
| | | DMD | | | AGCAGGGCUCUUUCAGUUUC | 2278 | |
| | | DMD | | | UAACAUUUUCAGCUUGAACC | 2279 | |
| | | DMD | | | UCAAGCUGAAAAUGUUACAC | 2280 | |
| | | DMD | | | GUAACAUUUUCAGCUUGAAC | 2281 | |
| | | DMD | | | CAGAAUGAAUUUUGGAGCAC | 2282 | |
| | | DMD | | | UUUAUUAUUAUUGACUGGUG | 2283 | |
| | | DMD | | | AGAAGAAUCUGACCUUUACA | 2284 | |
| | | DMD | | | GCAGGGCUCUUUCAGUUUCU | 2285 | |
| | | DMD | | | CUAAACAGUAGCCAGGCGUG | 2286 | |
| | | DMD | | | CGCCUGGCUACUGUUUAGUG | 2287 | |
| | | DMD | | | CUCCGCACUAAACAGUAGCC | 2288 | |
| | | DMD | | | GUAGCCAGGCGUGUGGAUGU | 2289 | |
| | | DMD | | | CUUGGCUUUGACUAUUCUGC | 2290 | |
| | | DMD | | | AGUAGCCAGGCGUGUGGAUG | 2291 | |
| | | DMD | | | UCCUCCCACAUCCACACGCC | 2292 | |
| | | DMD | | | UUGGCUUUGACUAUUCUGCU | 2293 | |
| | | DMD | | | AUAAUGUCUCUGGCUUGUAA | 2294 | |
| | | DMD | | | UGGUACCCGGCAGCUCUCUG | 2295 | |
| | | DMD | | | GUGGGAGGAACCUCAAAGAG | 2296 | |
| | | DMD | | | UGACUAUUCUGCUGGGAACA | 2297 | |
| | | DMD | | | CUCUCUGAGGAAUGUUCCCU | 2298 | |
| | | DMD | | | AACAUUCCUCAGAGAGCUGC | 2299 | |
| | | DMD | | | AUUCUGAAGCUCCAAACAAU | 2300 | |
| | | DMD | | | UAAAUUACUCUGCUAAAGUA | 2301 | |
| | | DMD | | | AGUACAAACCAGGUUUGUAC | 2302 | |
| | | DMD | | | AUAUCCUUCCAGUACAAACC | 2303 | |
| | | DMD | | | CAAACCAGGUUUGUACUGGA | 2304 | |
| | | DMD | | | GGCAGCUAAAGCAUCACUGA | 2305 | |
| | | DMD | | | AUCUCUGAGUAGUACAAACC | 2306 | |
| | | DMD | | | GUGUCCCAUUCUCUUUGACU | 2307 | |
| | | DMD | | | UGUGUCCCAUUCUCUUUGAC | 2308 | |
| | | DMD | | | UUCUGAAUGUUGAACAAGUA | 2309 | |
| | | DMD | | | GUCUCCCAGUCAAAGAGAAU | 2310 | |
| | | DMD | | | AUUCUCUUUGACUGGGAGAC | 2311 | |
| | | DMD | | | UCUUUGACUGGGAGACAGGC | 2312 | |
| | | DMD | | | GUGGUGUCCUUUGAAUAUGC | 2313 | |
| | | DMD | | | AGAUUGUCCAGGAUAUAAUU | 2314 | |
| | | DMD | | | UUAGCAACCAAAUUAUAUCC | 2315 | |
| | | DMD | | | GUUGAAAUUAAACUACACAC | 2316 | |
| | | DMD | | | AUCUUUACCUGCAUAUUCAA | 2317 | |
| | | DMD | | | GUGUCCUUUGAAUAUGC | 2318 | |
| | | DMD | | | UUGUCCAGGAUAUAAUU | 2319 | |
| | | DMD | | | GCAACCAAAUUAUAUCC | 2320 | |
| | | DMD | | | GAAAUUAAACUACACAC | 2321 | |
| | | DMD | | | UUUACCUGCAUAUUCAA | 2322 | |
| | | DMD | | | UACACAUUUUUAGGCUUGAC | 2323 | |
| | | DMD | | | CAUUCCUGGGAGUCUGUCAU | 2324 | |
| | | DMD | | | UGUAUGAUGCUAUAAUACCA | 2325 | |
| | | DMD | | | GUGGAAAGUACAUAGGACCU | 2326 | |
| | | DMD | | | UCUUAUCAUAACUCUUACCA | 2327 | |
| | | DMD | | | ACAUUUUUAGGCUUGAC | 2328 | |
| | | DMD | | | UCCUGGGAGUCUGUCAU | 2329 | |
| | | DMD | | | AUGAUGCUAUAAUACCA | 2330 | |
| | | DMD | | | GAAAGUACAUAGGACCU | 2331 | |
| | | DMD | | | UAUCAUAACUCUUACCA | 2332 | |
| | | DMD | | | GAGTTCCTACTCAGACTGTTAC | 2333 | |
| | | | | | TC | | |
| | | DMD | | | GTGAGTTCCTACTCAGACTGTT | 2334 | |
| | | | | | ACTC | | |
| | | DMD | | | GTCTGAGTTCCTACTCAGACTG | 2335 | |
| | | | | | TTACTC | | |
| | | DMD | | | AAAGATATATAATGTCATGAAT | 2336 | |
| | | DMD | | | GCAGAATCAAATATAATAGTCT | 2337 | |
| | | DMD | | | AACAAATATCCCTTAGTATC | 2338 | |
| | | DMD | | | AATGTATTTCTTCTATTCAA | 2339 | |
| | | DMD | | | AACAATAAGTCAAATTTAATTG | 2340 | |
| | | DMD | | | GAACTGGTGGGAAATGGTCTA | 2341 | |
| | | | | | G | | |
| | | DMD | | | TCCTTTGGTAAATAAAAGTCCT | 2342 | |
| | | DMD | | | TAGGAATCAAATGGACTTGGAT | 2343 | |
| | | DMD | | | TAATTCTTTCTAGAAAGAGCCT | 2344 | |
| | | DMD | | | CTCTTGCATCTTGCACATGTCC | 2345 | |
| | | DMD | | | ACTTAGAGGTCTTCTACATACA | 2346 | |
| | | DMD | | | TCAGAGGTGAGTGGTGAGGGG | 2347 | |
| | | | | | A | | |
| | | DMD | | | ACACACAGCTGGGTTATCAGA | 2348 | |
| | | | | | G | | |
| | | DMD | | | CACAGCTGGGTTATCAGAG | 2349 | |
| | | DMD | | | ACACAGCTGGGTTATCAGAG | 2350 | |
| | | DMD | | | CACACAGCTGGGTTATCAGAG | 2351 | |
| | | DMD | | | AACACACAGCTGGGTTATCAG | 2352 | |
| | | | | | AG | | |
| | | DMD | | | CTGSTGGGARATGGTCTAG | 2353 | |
| | | DMD | | | ACTGGTGGGAAATGGTCTAG | 2354 | |
| | | DMD | | | AACTGGTGGGAAATGGTCTAG | 2355 | |
| | | DMD | | | AGAACTGGTGGGAAATGGTCT | 2356 | |
| | | | | | AG | | |
| | | DMD | | | ATATCTTCTTAAATACCCGA | 2357 | |
| | | DMD | | | AGTCTCACAAAACTGCAGAG | 2358 | |
| | | DMD | | | TACTTATGTATTTTAAAAAC | 2359 | |
| | | DMD | | | GAATAATTTCTATTATATTACA | 2360 | |
| | | DMD | | | TTCGAAAATTTCAGGTAAGCCG | 2361 | |
| | | DMD | | | TCATTTCTAAAAGTCTTTTGCC | 2362 | |
| | | DMD | | | TTTGAGACACAGTATAGGTTAT | 2363 | |
| | | DMD | | | ATATAATAGAAATTATTCAT | 2364 | |
| | | DMD | | | TAATATGCCCTGTAATATAA | 2365 | |
| | | DMD | | | TGATATCATCAATATCTTTG | 2366 | |
| | | DMD | | | GCAATTAATTGGAAAATGTG | 2367 | |
| | | DMD | | | CTTTAAGCTTAGGTAAAATCA | 2368 | |
| | | DMD | | | CAGTAATGTGTCATACCTTC | 2369 | |
| | | DMD | | | CAGGGCATATTATATTTAGA | 2370 | |
| | | DMD | | | CAAAAGCCAAATCTATTTCA | 2371 | |
| | | DMD | | | ATGCTTTGGTGGGAAGAAGTA | 2372 | |
| | | | | | GAGGA | | |
| | | DMD | | | ATGCTTTGGTGGGAAGAATAG | 2373 | |
| | | | | | AGGAC | | |
| | | DMD | | | TTGTGACAAGCTCACTAATTAG | 2374 | |
| | | | | | G | | |
| | | DMD | | | AAGTTTGAAGAACTTTTACCAG | 2375 | |
| | | | | | G | | |
| | | DMD | | | AGGCAGCGATAAAAAAAACCT | 2376 | |
| | | | | | GG | | |
| | | DMD | | | GCTTTGGTGGGAAGAAGTAGA | 2377 | |
| | | | | | GG | | |

### VII. EXAMPLES

[0212] The following examples are included to demonstrate preferred embodiments of the disclosure. It should be appreciated by those of skill in the art that the techniques disclosed in the examples which follow represent techniques discovered by the inventor to function well in the practice of the disclosure, and thus can be considered to constitute preferred modes for its practice. However, those of skill in the art should, in light of the present disclosure, appreciate that many changes can be made in the specific embodiments which are disclosed and still obtain a like or similar result without departing from the spirit and scope of the disclosure.

### Example 1

[0213] Genomic editing with CRISPR/Cas9 is a promising new approach for correcting or mitigating disease-causing mutations. Duchenne muscular dystrophy (DMD) is associated with lethal degeneration of cardiac and skeletal muscle caused by more than 3000 different mutations in the X-linked dystrophin gene (DMD). Most of these mutations are clustered in “hotspots.” There is a fortuitous correspondence between the eukaryotic splice acceptor and splice donor sequences and the protospacer adjacent motif sequences that govern prokaryotic CRISPR/Cas9 target gene recognition and cleavage. Taking advantage of this correspondence, optimal guide RNAs capable of introducing insertion/deletion (indel) mutations by nonhomologous end joining that abolish conserved RNA splice sites in 12 exons that potentially allow skipping of the most common mutant or out-of-frame DMD exons within or nearby mutational hotspots were screened. Correction of DMD mutations by exon skipping is referred to herein as “myoediting.” In proof-of-concept studies, myoediting was performed in representative induced pluripotent stem cells from multiple patients with large deletions, point mutations, or duplications within the DMD gene and efficiently restored dystrophin protein expression in derivative cardiomyocytes. In three-dimensional engineered heart muscle (EHM), myoediting of DMD mutations restored dystrophin expression and the corresponding mechanical force of contraction. Correcting only a subset of cardiomyocytes (30 to 50%) was sufficient to rescue the mutant EHM phenotype to near-normal control levels. Thus, abolishing conserved RNA splicing acceptor/donor sites and directing the splicing machinery to skip mutant or out-of-frame exons through myoediting allow correction of the cardiac abnormalities associated with DMD by eliminating the underlying genetic basis of the disease.

Identification of Optimal Guide RNAs to Target 12 Different Exons Associated with Hotspot Regions of DMD Mutations

[0214] A list of the top 12 exons that, when skipped, can potentially restore the dystrophin open reading frame in most of the hotspot regions of DMD mutations is shown in Table 5. As an initial step toward correcting a majority of human DMD mutations by exon skipping, pools of guide RNAs were screened to target the top 12 exons of the human DMD gene (FIGS. 1A and 1B). Three to six PAM sequences (NAG or NGG) were selected to target the 3′ or 5′ splice sites, respectively, of each exon (FIG. 1A and Table 5). These guide RNAs were cloned in plasmid SpCas9-2A-GFP. Indels that remove essential splice donor or acceptor sequences allow for skipping of the corresponding target exon. On the basis of the frequency of known DMD mutations, these guide RNAs would be predicted to be capable of rescuing dystrophin function in up to 60% of DMD patients.

[0215] To test the feasibility and efficacy of this strategy in the human genome, human embryonic kidney 293 cells (239 cells) were used to target the splice acceptor site of exon 51 (FIG. 1C). Transfected 293 cells were sorted by green fluorescent protein (GFP) expression, and gene editing efficiency was detected by the mismatch-specific T7E1 endo-nuclease assay (FIG. 6A). The ability of three guide RNAs (Ex51-g1, Ex51-g2, and Ex51-g3) to target the splice acceptor site of exon 51 is shown in Table 5 and FIG. 2B. In GFP-positive sorted 293 cells, Ex51-g3 showed high editing activity, whereas Ex51-g1 and Ex51-g2 had no detectable activity. Next, cleavage efficiency of guide RNAs, which target the top 12 exons, including exons 51, 45, 53, 44, 46, 52, 50, 43, 6, 7, 8, and 55, was evaluated. One or two guide RNAs with the highest efficiency of editing of each exon are shown in FIG. 1C. The selected guide RNAs for exons 51, 45, and 55 use NAG as the PAM (Table 5). Genomic polymerase chain reaction (PCR) products from the myoedited top 12 exons were cloned and sequenced (FIG. 5A and Table 20). Indels were observed that removed essential splice sites or shifted the open reading frame (FIG. 5A). In brain and kidney tissues, an N-terminally truncated form of dystrophin (Dp140) is transcribed from an alternative promoter in intron 44. Skipping of six targeted exons (exons 51, 53, 46, 52, 50, and 55) in Dp140 mRNA was confirmed in 293 cells by sequencing of reverse transcription PCR (RT-PCR) products (FIG. 5B).

TABLE 20
Sequence of primers for top 12 exons.
PCR/T7E1 and RT-PCR primers

| Exon | | SEQ ID | | SEQ ID |
|---|---|---|---|---|
| # | PCR/T7E1 | NO: | RT-PCR | NO: |
| 51 | F: TTCCCTGGCAAGGTCTGA | 2427 | F-E47: CCCAGAAGAGCAAGATAAACTTGAA | 2451 |
| | R: ATCCTCAAGGTCACCCACC | 2428 | R-E52: CTCTGTTCCAAATCCTGCATTGT | 2452 |
| 45 | F: GTCTTTCTGTCTTGTATCCTTTGG | 2429 | | |
| | R: AATGTTAGTGCCTTTCACCC | 2430 | | |
| 53 | F: GGGAAATCAGGCTGATGGGT | 2431 | F-E52: CAAGACCAGCAATCAAGAGGCTAG | 2453 |
| | R: GTCTACTGTTCATTTCAGC | 2432 | R-E54: TCATGTGGACTTTTCTGGTATCATC | 2454 |
| 44 | F: GCAGGAAACTATCAGAGTG | 2433 | | |
| | R: ACACCTTGCTGTTACGAT | 2434 | | |
| 46 | F: CCACCAAACCTGGCAAAT | 2435 | F-E45: GAACTCCAGGATGGCATTGG | 2455 |
| | R: | 2436 | R-E52: CTCTGTTCCAAATCCTGCATTGT | 2456 |
| | GAACTATGAATAACCTAATGGGC | | | |
| | AG | | | |
| 52 | F: TTCTTACTCAAGGCATTCAGAC | 2437 | F-E51: GAAACTGCCATCTCCAAACTAGAAA | 2457 |
| | R: GGTCACCACACCCATCAAT | 2438 | R-E54: TTCTCCAAGAGGCATTGATATTCTC | 2458 |
| 50 | F: TGCCTGGAGAAAGGGTTT | 2439 | R-E47: CCCAGAAGAGCAAGATAAACTTGAA | 2459 |
| | R: GCACAGTCAATAACACAAAGGT | 2440 | R-E52: CTCTGTTCCAAATCCTGCATTGT | 2460 |
| 43 | F: AGCGATCCACTCTCTCAGGATG | 2441 | | |
| | R: | 2442 | | |
| | GCACCTCAATGCCCCAATCTGATT | | | |
| | TACG | | | |
| 6 | F: GGGTCTAATATGGCAGAATCCA | 2443 | | |
| | R: | 2444 | | |
| | GTTGTAAAGTAGGACATGATCTG | | | |
| | G | | | |
| 7 | F: AGGACTATGGGCATTGGTT | 2445 | | |
| | R: | 2446 | | |
| | GTGTAGAAATGACAAGTCTCAGA | | | |
| | TG | | | |
| 8 | F: | 2447 | | |
| | GAAAGCTACTCTGTTAGATGGGCT | | | |
| | AG | | | |
| | R: GGCTTTGTATATATACACGTG | 2448 | | |
| 55 | F: GCAGCATCAAAGACAAGCA | 2449 | F-E52: CAAGACCAGCAATCAAGAGGCTAG | 2461 |
| | R: TCCTTACGGGTAGCATCC | 2450 | R-E56: GAGAGACTTTTTCCGAAGTTCAC | 2462 |

### Correction of Diverse DMD Patient Mutations by Myoediting

[0216] To evaluate the effectiveness of a single-guide RNA to correct different types of human DMD mutations by exon skipping, three DMD iPSC lines with representative types of DMD mutations were obtained: a large deletion (termed Del; lacking exons 48 to 50), a pseudo-exon mutation (termed pEx; caused by an intronic point mutation), and a duplication mutation (termed Dup). Briefly, peripheral blood mono-nuclear cells (PBMCs) obtained from whole blood were cultured and then reprogrammed into iPSCs using recombinant Sendai viral vectors expressing reprogramming factors. Cas9 and guide RNAs for correction or bypass of the mutations in iPSC myoediting on an iPSC line (also known as Del) from a DMD patient with a large deletion of exons 48 to lines were introduced into cells by nucleofection. Pools of treated cells or single clones were then differentiated into induced cardiomyocytes (iCMs) using standardized conditions. Purified iCMs were used to generate 3D-EHM and to perform functional assays (FIG. 2A).

### Correction of a Large Deletion Mutation

[0217] It is estimated that ˜60 to 70% of DMD cases are caused by large deletions of one or more exons. Myoediting was performed on an iPSC line from a DMD patient with a large deletion of exons 48 to 50 in a hotspot. The large deletion creates a frameshift mutation and introduces a premature stop codon in exon 51, as shown in FIG. 2B. Destruction of the splice acceptor in exon 51 will, in principle, allow for splicing of exons 47 to 52, thereby reconstituting the open reading frame (FIG. 2B and FIG. 6B). Theoretically, skipping exon 51 can potentially correct ˜13% of DMD patients. Optimized guide RNA Ex51-g3 and Cas9 (FIG. 2C) were nucleofected into this iPSC line, resulting in successful destruction of the splice acceptor or reframing of exon 51 by NHEJ, as demonstrated by genomic sequencing, and restoration of the open reading frame (FIG. 6B). The pool of myoedited and DMD iPSCs (Del-Cor.) was differentiated into iCMs and rescue of in-frame dystrophin mRNA expression was confirmed by sequencing of RT-PCR products from amplification of exons 47 to 52 (FIG. 2D and FIG. 6C).

### Correction of a Pseudo-Exon Mutation

[0218] To further extend this approach to rare mutations, attempts were made to correct a point mutation within iPSCs from a DMD patient (also known as pEx), who has a spontaneous point mutation in intron 47 (c.6913-4037T>G). This point mutation generates a novel RNA splicing acceptor site (YnNYAG) and results in a pseudo-exon of exon 47A (FIG. 2E), which encodes a premature stop signal. Two guide RNAs (Ex47A-g1 and Ex47A-g2) were designed to precisely target the mutation (FIG. 2F and FIG. 7A and 7B). As shown in FIG. 2G, myoediting abolished the cryptic splice acceptor site and permanently skipped the pseudo-exon, restoring full-length dystrophin protein in the corrected cells (pEx-Cor.). The efficacy of exon skipping was tested by RT-PCR in these DMD iCMs (FIG. 2G). Sequencing of the RT-PCR products confirmed that exon 47 was spliced to exon 48 (FIG. 7C).

[0219] It is noteworthy that Ex47A-g2 targets only the mutant allele because the wild-type intron lacks the PAM sequence (NAG) for SpCas9. Moreover, the T>G mutation in this patient creates a disease-specific PAM sequence (AG) for Cas9. It is also noteworthy that this type of correction restores the normal dystrophin protein without any internal deletions (FIGS. 7B and 7C).

### Correction of a Large Duplication Mutation

[0220] Exon duplications account for ˜10 to 15% of identified DMD-causing mutations. Myoediting was tested on an iPSC line (also known as Dup) from a DMD patient with a large duplication (exons 55 to 59), which disrupts the dystrophin open reading frame (FIG. 2H). Whole-genome sequencing and analysis the copy number variation profile in cells from this patient was performed and identified the precise insertion site in intron 54 (FIG. 2H). This insertion site (In59-In54 junction) was confirmed by PCR (FIG. 8A and Table 4).

[0221] It was hypothesized that the 5′ flanking sequence of the duplicated exon 55 is identical such that one guide RNA targeting this region should be able to make two DSBs and delete the entire duplicated region (exons 55 to 59; ˜150 kb). To test this hypothesis, three guide RNAs (In54-g1, In54-g2, and In54-g3) were designed to target sequences near the junction of intron 54 and exon 55 (FIG. 2I). The efficiency of DNA cutting with these guide RNAs was evaluated in 293 cells by T7E1 (FIG. 8B). Guide RNA In54-g1 was selected for subsequent experiments on Dup iPSCs. Genomic PCR products from the myoedited Dup iPSC mixture were cloned and sequenced (FIG. 8C).

[0222] To confirm the correction of the duplication mutation, the pool of treated DMD iPSCs (also known as Dup-Cor.) was differentiated into cardiomyocytes. mRNA with duplicated exons was semiquantified by RT-PCR using the duplication-specific primers (Ex59F, a forward primer in exon 59, and Ex55R, a reverse primer in exon 55) and normalized to expression of the b-actin gene (FIG. 2J and Table 4). As expected, the duplication-specific RT-PCR band was absent in wild-type (WT) cells and was decreased dramatically in Dup-Cor. cells. To confirm this result, RT-PCR on the duplication borders of exon 53 to Ex55 and Ex59 to exon 60 (FIG. 8D) was performed. The intensity of duplication-specific upper bands was decreased in corrected iCMs. Single colonies were picked from the treated mixture of cells. Duplication-specific PCR primers (F2-R1) were used to screen the corrected colonies (FIG. 8E). PCR results of three representative corrected colonies (Dup-Cor. #4, #6, and #26) and the uncorrected control (Dup) are shown in FIG. 8E. The absence of a duplication-specific PCR band in colonies 4, 6, and 26 confirmed the deletion of the duplicated DNA region.

Restoration of Dystrophin Protein in Patient-Derived iCMs by Myoediting

[0223] Next, the restoration and stable expression of dystrophin protein in single clones and pools of treated iCMs was confirmed by immunocytochemistry (FIG. 3A to 3C, and FIGS. 6D, 7D, and 8F) and Western blot analysis (FIG. 24, D to F). Even without clonal selection and expansion, most of the iCMs in Del-Cor., pEx-Cor., and Dup-Cor. were dystrophin-positive (FIG. 3A to 3C, and FIGS. 6D, 7D, and 8F). From mixtures of myoedited Del iPSCs, two clones (#16 and #27) were picked and differentiated into cardiomyocytes. Clone #27, which has a higher dystrophin expression level, was selected for subsequent experiments (also known as Del-Cor-SC). One selected clone for corrected pEx (#19) was used for further studies (also known as pEx-Cor-SC). Two selected clones for corrected Dup (#26 and #6) were differentiated into iCMs. Clone #6 was used for functional assay experiments (also known as Dup-Cor-SC). Dystrophin protein expression levels of the corrected iCMs were estimated to be comparable to WT cardiomyocytes (50 to 100%) by immunocytochemistry and Western blot analysis (FIG. 3).

Restoration of Function of Patient-Derived iCMs by Myoediting

[0224] In addition to measuring dystrophin mRNA and protein expression by biochemical methods, functional analysis to the macroscale was used, using 3D-EHM derived from normal, DMD, and corrected DMD iCMs. Briefly, iPSCs-derived cardiomyocytes were metabolically purified by glucose deprivation. Purified cardiomyocytes were mixed with human foreskin fibroblasts (HFFs) at a 70%:30% ratio. The cell mixture was reconstituted in a mixture of bovine collagen and serum-free medium. After 4 weeks in culture, contraction experiments were performed (FIG. 4A).

[0225] EHMs from eight iPSC lines were tested: (i) WT, (ii) uncorrected Del, (iii) Del-Cor-SC, (iv) uncorrected pEx, (v) pEx-Cor., (vi) pEx-Cor-SC, (vii) uncorrected Dup, and (viii) Dup-Cor-SC. Functional phenotyping of DMD and corrected DMD cardiomyocytes in EHM revealed a contractile dysfunction in all DMD EHMs (Del, pEx, and Dup) compared to WT EHMs (FIG. 4B to 4E). A more pronounced contractile dysfunction was seen in Del compared with pEx and Dup EHM. Force of contraction (FOC) was markedly reduced in DMD EHMs and was significantly improved in corrected DMD EHMs (Del-Cor-SC, pEx-Cor-SC, and Dup-Cor-SC) (FIG. 4B to 4E) with completely restored cardiomyocyte maximal inotropic capacity in Dup-Cor-SC (FIGS. 4D and 4E).

[0226] Because current gene therapy delivery methods are only able to affect a portion of the heart muscle, an obvious question is what percentage of corrected cardiomyocytes is needed to rescue the phenotype of DCM. To address this question, DMD cells (Del) and corrected DMD cells (Del-Cor-SC) were precisely mixed to simulate a wide range of “therapeutic efficiency” (10 to 100%) in EHM (FIG. 4F). This revealed that 30 to 50% of cardiomyocytes need to be repaired for partial (30%) or maximal (50%) rescue of the contractile phenotype (FIG. 4F). These findings are consistent with previous in vivo studies showing that mosaic dystrophin expression in 50% cardiomyocytes in carrier mice resulted in a near-normal cardiac phenotype. Our findings show that contractile dysfunction was efficiently restored in corrected DMD EHM to a comparable level of WT EHM. Myoediting is thus a highly specific and efficient approach to rescue clinical phenotypes of DMD in EHM.

### Discussion

[0227] The DMD gene is the largest known gene in the human genome, encompassing 2.6 million base pairs and encoding 79 exons. The large size and complicated structure of the DMD gene contribute to its high rate of spontaneous mutation. There are ˜3000 documented mutations in humans, which include large deletions or duplications (˜77%), small indels (˜12%), and point mutations (˜9%). These mutations mainly affect exons; however, intronic mutations can alter the splicing pattern and cause the disease, as shown here for the pEx mutation.

[0228] To potentially simplify the correction of diverse DMD mutations by CRISPR/Cas9 gene editing, guide RNAs were identified that are capable of skipping the top 12 exons, which account for ˜60% of DMD patients. Thus, it is not necessary to design individual guides for each DMD mutation or excise large genomic regions with pairs of guide RNAs.

[0229] Rather, patient mutations can be grouped such that skipping of individual exons can restore dystrophin expression in large numbers of patients. In the proof-of-concept study described in Example 1, the optimized myoediting approach using only one guide RNA efficiently restored the DMD open reading frame in a wide spectrum of mutation types, including large deletions, point mutations, and duplications, which cover most of the DMD population. Even relatively large and complex deletions can be corrected by a single cut in the DNA sequence that eliminates a splice acceptor or donor site without the requirement for multiple guide RNAs to direct simultaneous cutting at distant sites with ligation of DNA ends. Although exon-skipping mainly converts DMD to milder BMD, for a subset of patients with duplication or pseudo-exon mutations, myoediting can eliminate the mutations and restore the production of normal dystrophin protein, as we have shown in this study for pEx and Dup mutations.

[0230] Dilated cardiomyopathy, characterized by contractile dysfunction and ventricular chamber enlargement, is one of the main causes of death in DMD patients. However, because of the marked interspecies differences in cardiac physiology and anatomy, as well as the natural history of the disease, the shortened longevity of these animals (˜2 years), and the small size of their hearts ( 1/3000 the size of the human heart), cardiomyopathy is not generally observed in mouse models of DMD at the young age. To overcome limitations and shortcomings of 2D cell culture systems and small animal models, human iPSC-derived 3D-EHM was used to show that dystrophin mutations impaired cardiac contractility and sensitivity to calcium concentration. Contractile dysfunction was observed in DMD EHM, resembling the DCM clinical phenotype of DMD patients. Contractile dysfunction was partially-to-fully restored in corrected DMD EHM by myoediting. Thus, genome editing represents an effective means of eliminating the genetic cause and correcting the muscle and cardiac abnormalities associated with DMD. The data presented herein further demonstrate that EHM serves as a suitable preclinical tool to approximate therapeutic efficiency of myoediting.

[0231] Human CRISPR clinical trials received approval in China and the United States. One key concern for the CRISPR/Cas9 system is specificity because off-target effects may cause unexpected mutations in the genome. Multiple approaches have been developed to evaluate possible off-target effects, including (i) in silico prediction of target sites and testing them by deep sequencing and (ii) unbiased whole-genome sequencing. In addition, several new approaches have been reported to minimize potential off-target effects and/or to improve the specificity of the CRISPR/Cas9 system, including titration of dosage of Cas9 and guide RNA, paired Cas9 nickases, truncated guide RNAs, and high-fidelity or enhanced Cas9. Although most studies have used in vitro cell culture systems, we and others did not observe off-target effects in our previous studies of germline editing and post-natal editing in mice. According to a recent study of gene editing in human preimplantation embryos, off-target mutations were also not detected in the edited genome. Although comprehensive and extensive analysis of off-target effects is beyond the scope of this study, we are aware that it will eventually be important to thoroughly evaluate possible off-target effects of individual guide RNAs before potential therapeutic application.

### Materials and Methods

[0232] Plasmids.

[0233] The pSpCas9(BB)-2A-GFP (PX458) plasmid containing the human codon-optimized SpCas9 gene with 2A-EGFP and the backbone of guide RNA was a gift from F. Zhang (plasmid #48138, Addgene). Cloning of guide RNA was carried out according to the Feng Zhang Lab CRISPR plasmid instructions (addgene.org/crispr/zhang/).

[0234] Transfection and Cell Sorting of Human 293 Cells.

[0235] Cells were transfected by Lipofectamine 2000 Transfection Reagent (Thermo Fisher Scientific) according to the manufacturer's instructions, and the cells were incubated for a total of 48 to 72 hours. Cell sorting was performed by the Flow Cytometry Core Facility at University of Texas (UT) Southwestern Medical Center. Transfected cells were dissociated using trypsin-EDTA solution. The mixture was incubated for 5 min at 37° C., and 2 ml of warm Dulbecco's modified Eagle's medium supplemented with 10% fetal bovine serum was added. The resuspended cells were transferred into a 15-ml Falcon tube and gently triturated 20 times. The cells were centrifuged at 1300 rpm for 5 min at room temperature. The medium was removed, and the cells were resuspended in 500 ml of phosphate-buffered saline (PBS) supplemented with 2% bovine serum albumin (BSA). Cells were filtered into a cell strainer tube through its mesh cap. Sorted single cells were separated into microfuge tubes into GFP+ and GFP-cell populations.

[0236] Human iPSC Maintenance, Nucleofection, and Differentiation.

[0237] The DMD iPSC line Del was purchased from Cell Bank RIKEN BioResource Center (cell no. HPS0164). The WT iPSC line was a gift from D. Garry (University of Minnesota). Other iPSC lines (pEx and Dup) were generated and maintained by UT Southwestern Wellstone Myoediting Core. Briefly, PBMCs obtained from DMD patients' whole blood were cultured and then reprogrammed into iPSCs using recombinant Sendai viral vectors expressing reprogramming factors (Cytotune 2.0, Life Technologies). iPSC colonies were validated by immuno-cytochemistry, mycoplasma testing, and teratoma formation. Human iPSCs were cultured in mTeSRTM1 medium (STEMCELL Technologies) and passaged approximately every 4 days (1:18 split ratio). One hour before nucleofection, iPSCs were treated with 10 mM ROCK inhibitor (Y-27632) and dissociated into single cells using Accutase (Innovative Cell Technologies Inc.). Cells (1×10⁶) were mixed with 5 mg of SpCas9-2A-GFP plasmid and nucleofected using the P3 Primary Cell 4D-Nucleofector X kit (Lonza) according to manufacturer's protocol. After nucleofection, iPSCs were cultured in mTeSRTM1 medium supplemented with 10 mM ROCK inhibitor, penicillin-streptomycin (1:100) (Thermo Fisher Scientific), and primosin (100 mg/ml; InvivoGen). Three days after nucleofection, GFP+ and GFP− were sorted by fluorescence-activated cell sorting, as described above, and subjected to PCR and T7E1 assay.

[0238] Isolation of Genomic DNA from Sorted Cells.

[0239] Protease K (20 mg/ml) was added to DirectPCR Lysis Reagent (Viagen Biotech Inc.) to a final concentration of 1 mg/ml. Cells were centrifuged at 4° C. at 6000 rpm for 10 min, and the supernatant was discarded. Cell pellets kept on ice were resuspended in 50 to 100 ml of DirectPCR/protease K solution and incubated at 55° C. for >2 hours or until no clumps were observed. Crude lysates were incubated at 85° C. for 30 min and then spun for 10 s. NaCl was added to a final concentration of 250 mM, followed by the addition of 0.7 volumes of isopropanol to precipitate DNA. The DNA was centrifuged at 4° C. at 13,000 rpm for 5 min, and the supernatant was discarded. The DNA pellet was washed with 1 ml of 70% EtOH and dissolved in water. The DNA concentration was measured using a NanoDrop instrument (Thermo Fisher Scientific).

[0240] Amplifying Targeted Genomic Regions by PCR.

[0241] PCR assays contained 2 ml of GoTaq polymerase (Promega), 20 ml of 5× green GoTaq reaction buffer, 8 ml of 25 mM MgCl₂, 2 ml of 10 mM primer, 2 ml of 10 mM deoxynucleotide triphosphate, 8 ml of genomic DNA, and double-distilled H₂O (ddH₂O) to 100 ml. PCR conditions were as follows: 94° C. for 2 min, 32× (94° C. for 15 s, 59° C. for 30 s, and 72° C. for 1 min), 72° C. for 7 min, and then held at 4° C. PCR products were analyzed by 2% agarose gel electrophoresis and purified from the gel using the QIAquick PCR Purification kit (Qiagen) for direct sequencing. These PCR products were subcloned into pCRII-TOPO vector (Invitrogen) according to the manufacturer's instructions. Individual clones were picked, and the DNA was sequenced.

[0242] T7E1 Analysis of PCR Products.

[0243] Mismatched duplex DNA was obtained by denaturation/renaturation of 25 ml of the genomic PCR samples using the following conditions: 95° C. for 10 min, 95° to 85° C. (−2.0° C./s), 85° C. for 1 min, 85° to 75° C. (−0.3° C./s), 75° C. for 1 min, 75° to 65° C. (−0.3° C./s), 65° C. for 1 min, 65° to 55° C. (−0.3° C./s), 55° C. for 1 min, 55° to 45° C. (−0.3° C./s), 45° C. for 1 min, 45° to 35° C. (−0.3° C./s), 35° C. for 1 min, 35° to 25° C. (−0.3° C./s), 25° C. for 1 min, and then held at 4° C.

[0244] Following denaturation/renaturation, the following was added to the samples: 3 ml of 10×NEBuffer 2, 0.3 ml of T7E1 (New England Biolabs), and ddH₂O to 30 ml. Digested reactions were incubated for 1 hour at 37° C. Undigested PCR samples and T7E1-digested PCR products were analyzed by 2% agarose gel electrophoresis.

[0245] Whole-Genome Sequencing.

[0246] Whole-genome sequencing was performed by submitting the blood samples to Novogene Corporation. Purified genomic DNA (1.0 mg) was used as input material for the DNA sample preparation. Sequencing libraries were generated using TruSeq Nano DNA HT Sample Preparation kit (Illumina) following the manufacturer's instructions. Briefly, the DNA sample was fragmented by sonication to a size of 350 bp. The DNA fragments were end-polished, A-tailed, and ligated with the full-length adapter for Illumina sequencing with further PCR amplification. The libraries were sequenced on an Illumina sequencing platform, and paired-end reads were generated.

[0247] Isolation of RNA.

[0248] RNA was isolated from cells using TRIzol RNA isolation reagent (Thermo Fisher Scientific) according to the manufacturer's instructions.

[0249] Cardiomyocyte Differentiation and Purification.

[0250] iPSCs were adapted and maintained in TESR-E8 (STEMCELL Technologies) on 1:120 Matrigel in PBS-coated plates and passaged using EDTA solution (Versene, Thermo Fisher Scientific) twice weekly. For cardiac differentiation, iPSCs were plated at 5×10⁴ to 1×10⁵ cells/cm² and induced with RPMI, 2% B27, 200 mM L-ascorbic acid-2-phosphate sesquimagnesium salt hydrate (Asc; Sigma-Aldrich), activin A (9 ng/ml; R&D Systems), BMP4 (5 ng/ml; R&D Systems), 1 mM CHIR99021 (Stemgent), and FGF-2 (5 ng/ml; Miltenyi Biotec) for 3 days; following another wash with RPMI medium, cells were cultured from days 4 to 13 with 5 mM IWP4 (Stemgent) in RPMI supplemented with 2% B27 and 200 mM Asc. Cardiomyocytes were metabolically purified by glucose deprivation from days 13 to 17 in glucose-free RPMI (Thermo Fisher Scientific) with 2.2 mM sodium lactate (Sigma-Aldrich), 100 mM b-mercaptoethanol (Sigma-Aldrich), penicillin (100 U/ml), and streptomycin (100 mg/ml). Cardiomyocyte purity was 92±2% from 15 independent differentiation runs (one to three for each cell line).

[0251] EHM Generation.

[0252] To generate defined, serum-free EHM, purified cardiomyocytes were mixed with HFFs (American Type Culture Collection) at a 70%:30% ratio. The cell mixture was reconstituted in a mixture of pH-neutralized medical-grade bovine collagen (0.4 mg per EHM; LLC Collagen Solutions) and concentrated serum-free medium [2×RPMI, 8% B27 without insulin, penicillin (200 U/ml), and streptomycin (200 mg/ml)] and cultured for 3 days in Iscove medium with 4% B27 without insulin, 1% nonessential amino acids, 2 mM glutamine, 300 mM ascorbic acid, IGF1 (100 ng/ml; AF-100-11), FGF-2 (10 ng/ml; AF-100-18B), VEGF165 (5 ng/ml; AF-100-20), TGF-b1 (5 ng/ml; AF-100-21C; all growth factors are from PeproTech), penicillin (100 U/ml), and streptomycin (100 mg/ml). After a 3-day condensation period, EHM were transferred to flexible holders to support auxotonic contractions. Analysis was carried out after a total EHM culture period of 4 weeks.

[0253] Analysis of Contractile Function.

[0254] Contraction experiments were performed under isometric conditions in organ baths at 37° C. in gassed (5% CO₂/95% 02) Tyrode's solution (containing 120 mM NaCl, 1 mM MgCl₂, 0.2 mM CaCl₂, 5.4 mM KCl, 22.6 mM NaHCO₃, 4.2 mM NaH₂PO₄, 5.6 mM glucose, and 0.56 mM ascorbate). EHM were electrically stimulated at 1.5 Hz with 5-ms square pulses of 200 mA. EHMs were mechanically stretched at intervals of 125 mm until the maximum systolic force amplitude (FOC) was observed according to the Frank-Starling law. Responses to increasing extracellular calcium (0.2 to 4 mM) were investigated to determine maximal inotropic capacity. Where indicated, forces were normalized to muscle content (sarcomeric α-actinin-positive cell content, as determined by flow cytometry).

[0255] Flow Cytometry of EHM-Derived Cells.

[0256] Single-cell suspensions of EHM were prepared as described previously and fixed in 70% ice-cold ethanol. Fixed cells were stained with Hoechst 3342 (10 mg/ml; Life Technologies) to exclude cell doublets. Cardiomyocytes were identified by sarcomeric a-actinin staining (clone EA-53, Sigma-Aldrich). Cells were run on a LSRII SORP cytometer (BD Biosciences) and analyzed using the DIVA software. At least 10,000 events were analyzed per sample.

[0257] Immunostaining.

[0258] iPSC-derived cardiomyocytes were fixed with acetone and subjected to immunostaining. Fixed cardiomyocytes were blocked with serum cocktail (2% normal horse serum/2% normal donkey serum/0.2% BSA/PBS), and incubated with dystrophin antibody (1:800; MANDYS8, Sigma-Aldrich) and troponin-I antibody (1:200; H170, Santa Cruz Biotechnology) in 0.2% BSA/PBS. Following overnight incubation at 4° C., they were incubated with secondary antibodies [biotinylated horse anti-mouse immunoglobulin G (IgG) (1:200; Vector Laboratories) and fluorescein-conjugated donkey anti-rabbit IgG (1:50; Jackson ImmunoResearch)] for 1 hour. Nuclei were counter-stained with Hoechst 33342 (Molecular Probes).

[0259] EHM cryosections to be immunostained were thawed, further air-dried, and fixed in cold acetone (10 min at −20° C.). Sections were briefly equilibrated in PBS (pH 7.3) and then blocked for 1 hour with serum cocktail (2% normal horse serum/2% normal donkey serum/0.2% BSA/PBS). Blocking cocktail was decanted, and dystrophin/troponin primary antibody cocktail [mouse anti-dystrophin, MANDYS8 (1:800; Sigma-Aldrich) and rabbit anti-troponin-I (1:200; H170, Santa Cruz Bio-technology)] in 0.2% BSA/PBS was applied without intervening wash. Following overnight incubation at 4° C., unbound primary antibodies were removed with PBS washes, and sections were probed for 1 hour with secondary antibodies [biotinylated horse anti-mouse IgG (1:200; Vector Laboratories) and rhodamine donkey anti-rabbit IgG (1:50; Jackson ImmunoResearch)] diluted in 0.2% BSA/PBS. Unbound secondary antibodies were removed with PBS washes, and final dystrophin labeling was carried out with a 10-min incubation of the sections with fluorescein-avidin-DCS (1:60; Vector Laboratories) diluted in PBS. Unbound rhodamine was removed with PBS washes, nuclei were counterstained with Hoechst 33342 (2 mg/ml; Molecular Probes), and slides were coverslipped with Vectashield (Vector Laboratories).

[0260] Western Blot Analysis.

[0261] Western blot analysis for human iPSC-derived cardiomyocytes was performed, using antibodies to dystrophin (ab15277, Abcam; D8168, Sigma-Aldrich), glyceraldehyde-3-phosphate dehydrogenase (MAB374, Millipore), and cardiac myosin heavy chain (ab50967, Abcam). Goat anti-mouse and goat anti-rabbit horseradish peroxidase-conjugated secondary antibodies (Bio-Rad) were used for described experiments.

All of the compositions and/or methods disclosed and claimed herein can be made and executed without undue experimentation in light of the present disclosure. While the compositions and methods of this disclosure have been described in terms of preferred embodiments, it will be apparent to those of skill in the art that variations may be applied to the compositions and/or methods and in the steps or in the sequence of steps of the method described herein without departing from the concept, spirit and scope of the disclosure. More specifically, it will be apparent that certain agents which are both chemically and physiologically related may be substituted for the agents described herein while the same or similar results would be achieved. All such similar substitutes and modifications apparent to those skilled in the art are deemed to be within the spirit, scope and concept of the disclosure as defined by the appended claims.

### VIII. REFERENCES

[0262] The following references, to the extent that they provide exemplary procedural or other details supplementary to those set forth herein, are specifically incorporated herein by reference.
[0263] Angel et al., Mol. Cell. Biol., 7:2256, 1987a.
[0264] Angel et al., Cell, 49:729, 1987b.
[0265] Aartsma-Rus et al., Hum. Mutat. 30, 293-299, 2009.
[0266] Baichwal and Sugden, In: Gene Transfer, Kucherlapati (Ed), NY, Plenum Press, 117-148, 1986.
[0267] Banerji et al., Cell, 27(2 Pt 1):299-308, 1981.
[0268] Banerji et al., Cell, 33(3):729-740, 1983.
[0269] Barnes et al., J. Biol. Chem., 272(17):11510-7, 1997.
[0270] Baskin et al., EMBO Mol Med 6, 1610-1621, 2014.
[0271] Benvenisty and Neshif, Proc. Natl. Acad. Sci. USA, 83:9551-9555, 1986.
[0272] Berkhout et al., Cell, 59:273-282, 1989.
[0273] Bhaysar et al., Genomics, 35(1):11-23, 1996.
[0274] Bikard et al., Nucleic Acids Res. 41(15): 7429-7437, 2013.
[0275] Blanar et al., EMBO J., 8:1139, 1989.
[0276] Bodine and Ley, EMBO J., 6:2997, 1987.
[0277] Boshart et al., Cell, 41:521, 1985.
[0278] Bostick et al., Mol Ther 19, 1826-1832, 2011.
[0279] Bosze et al., EMBO J., 5(7):1615-1623, 1986.
[0280] Braddock et al., Cell, 58:269, 1989.
[0281] Brinster et al., Proc. Natl. Acad. Sci. USA, 82(13):4438-4442, 1985.
[0282] Bulla and Siddiqui, J. Virol., 62:1437, 1986.
[0283] Burridge et al., Nat. Methods 11, 855-860, 2014.
[0284] Bushby et al., Lancet Neurol., 9(1): 77-93 (2010).
[0285] Bushby et al., Lancet Neurol., 9(2): 177-198 (2010).
[0286] Campbell & Kahl, Nature 338, 259-262, 1989.
[0287] Campbell and Villarreal, Mol. Cell. Biol., 8:1993, 1988.
[0288] Campere and Tilghman, Genes and Dev., 3:537, 1989.
[0289] Campo et al., Nature, 303:77, 1983.
[0290] Celander and Haseltine, J. Virology, 61:269, 1987.
[0291] Celander et al., J. Virology, 62:1314, 1988.
[0292] Chandler et al., Cell, 33:489, 1983.
[0293] Chang et al., Mol. Cell. Biol., 9:2153, 1989.
[0294] Chang et al., Stem Cells., 27:1042-1049, 2009.
[0295] Chatterjee et al., Proc. Natl. Acad. Sci. USA, 86:9114, 1989.
[0296] Chen and Okayama, Mol. Cell Biol., 7:2745-2752, 1987.
[0297] Cho et al., Nat. Biotechnol. 31(3): 230-232, 2013.
[0298] Choi et al., Cell, 53:519, 1988.
[0299] Cirak et al., The Lancet 378, 595-605, 2011.
[0300] Coffin, In: Virology, Fields et al. (Eds.), Raven Press, NY, 1437-1500, 1990.
[0301] Cohen et al., J. Cell. Physiol., 5:75, 1987.
[0302] Costa et al., Mol. Cell. Biol., 8:81, 1988.
[0303] Couch et al., Am. Rev. Resp. Dis., 88:394-403, 1963.
[0304] Coupar et al., Gene, 68:1-10, 1988.
[0305] Cripe et al., EMBO J., 6:3745, 1987.
[0306] Culotta and Hamer, Mol. Cell. Biol., 9:1376, 1989.
[0307] Dandolo et al., J. Virology, 47:55-64, 1983.
[0308] De Villiers et al., Nature, 312(5991):242-246, 1984.
[0309] Deschamps et al., Science, 230:1174-1177, 1985.
[0310] DeWitt et al., Sci Transl Med 8, 360ra134-360ra134, 2016.
[0311] Donnelly et al., J. Gen. Virol. 82, 1027-1041, 2001.
[0312] Dubensky et al., Proc. Natl. Acad. Sci. USA, 81:7529-7533, 1984.
[0313] Edbrooke et al., Mol. Cell. Biol., 9:1908, 1989.
[0314] Edlund et al., Science, 230:912-916, 1985.
[0315] EP 0273085
[0316] Fechheimer et al., Proc Natl. Acad. Sci. USA, 84:8463-8467, 1987.
[0317] Feng and Holland, Nature, 334:6178, 1988.
[0318] Ferkol et al., FASEB J., 7:1081-1091, 1993.
[0319] Firak et al., Mol. Cell. Biol., 6:3667, 1986.
[0320] Foecking et al., Gene, 45(1):101-105, 1986.
[0321] Fonfara et al., Nature 532, 517-521, 2016.
[0322] Fraley et al., Proc Natl. Acad. Sci. USA, 76:3348-3352, 1979
[0323] Franz et al., Cardoscience, 5(4):235-43, 1994.
[0324] Friedmann, Science, 244:1275-1281, 1989.
[0325] Fujita et al., Cell, 49:357, 1987.
[0326] Ghosh and Bachhawat, In: Liver Diseases, Targeted Diagnosis and Therapy Using Specific Receptors and Ligands, Wu et al. (Eds.), Marcel Dekker, NY, 87-104, 1991.
[0327] Ghosh-Choudhury et al., EMBO J., 6:1733-1739, 1987.
[0328] Gilles et al., Cell, 33:717, 1983.
[0329] Gloss et al., EMBO J., 6:3735, 1987.
[0330] Godbout et al., Mol. Cell. Biol., 8:1169, 1988.
[0331] Gomez-Foix et al., J. Biol. Chem., 267:25129-25134, 1992.
[0332] Goncalves et al., Mol Ther, 19(7): 1331-1341 (2011).
[0333] Goodbourn and Maniatis, Proc. Natl. Acad. Sci. USA, 85:1447, 1988.
[0334] Goodbourn et al., Cell, 45:601, 1986.
[0335] Gopal, Mol. Cell Biol., 5:1188-1190, 1985.
[0336] Gopal-Srivastava et al., J. Mol. Cell. Biol., 15(12):7081-90, 1995.
[0337] Graham and Prevec, In: Methods in Molecular Biology: Gene Transfer and Expression Protocol, Murray (Ed.), Humana Press, Clifton, N.J., 7:109-128, 1991.
[0338] Graham and van der Eb, Virology, 52:456-467, 1973.
[0339] Graham et al., J. Gen. Virol., 36:59-72, 1977.
[0340] Greene et al., Immunology Today, 10:272, 1989
[0341] Grosschedl and Baltimore, Cell, 41:885, 1985.
[0342] Grunhaus and Horwitz, Seminar in Virology, 3:237-252, 1992.
[0343] Harland and Weintraub, J. Cell Biol., 101:1094-1099, 1985.
[0344] Haslinger and Karin, Proc. Natl. Acad. Sci. USA, 82:8572, 1985.
[0345] Hauber and Cullen, J. Virology, 62:673, 1988.
[0346] Hen et al., Nature, 321:249, 1986.
[0347] Hensel et al., Lymphokine Res., 8:347, 1989.
[0348] Hermonat and Muzycska, Proc. Nat'l Acad. Sci. USA, 81:6466-6470, 1984.
[0349] Herr and Clarke, Cell, 45:461, 1986.
[0350] Hersdorffer et al., DNA Cell Biol., 9:713-723, 1990.
[0351] Herz and Gerard, Proc. Nat'l. Acad. Sci. USA 90:2812-2816, 1993.
[0352] Hirochika et al., J. Virol., 61:2599, 1987.
[0353] Holbrook et al., Virology, 157:211, 1987.
[0354] Hollinger & Chamberlain, Current Opinion in Neurology 28, 522-527, 2015.
[0355] Horlick and Benfield, Mol. Cell. Biol., 9:2396, 1989.
[0356] Horwich et al., J. Virol., 64:642-650, 1990.
[0357] Hsu et al., Natl Biotechnol. 31:827-832, 2013
[0358] Huang et al., Cell, 27:245, 1981.
[0359] Hug et al., Mol. Cell. Biol., 8:3065, 1988.
[0360] Hwang et al., Mol. Cell. Biol., 10:585, 1990.
[0361] Imagawa et al., Cell, 51:251, 1987.
[0362] Imbra and Karin, Nature, 323:555, 1986.
[0363] Imler et al., Mol. Cell. Biol., 7:2558, 1987.
[0364] Imperiale and Nevins, Mol. Cell. Biol., 4:875, 1984.
[0365] Jakobovits et al., Mol. Cell. Biol., 8:2555, 1988.
[0366] Jameel and Siddiqui, Mol. Cell. Biol., 6:710, 1986.
[0367] Jaynes et al., Mol. Cell. Biol., 8:62, 1988.
[0368] Jinek et al., Science 337, 816-821, 2012.
[0369] Johnson et al., Mol. Cell. Biol., 9:3393, 1989.
[0370] Jones and Shenk, Cell, 13:181-188, 1978.
[0371] Kadesch and Berg, Mol. Cell. Biol., 6:2593, 1986.
[0372] Kaneda et al., Science, 243:375-378, 1989.
[0373] Karin et al., Mol. Cell. Biol., 7:606, 1987.
[0374] Karlsson et al., EMBO J., 5:2377-2385, 1986.
[0375] Katinka et al., Cell, 20:393, 1980.
[0376] Kato et al., J Biol Chem., 266(6):3361-3364, 1991.
[0377] Kawamoto et al., Mol. Cell. Biol., 8:267, 1988.
[0378] Kelly et al., J. Cell Biol., 129(2):383-96, 1995.
[0379] Kiledjian et al., Mol. Cell. Biol., 8:145, 1988.
[0380] Kim et al., Nature Biotechnology, 1-2, 2016.
[0381] Kim et al., Nature Biotechnology 34, 876-881, 2016.
[0382] Kimura et al., Dev. Growth Differ., 39(3):257-65, 1997.
[0383] Klamut et al., Mol. Cell. Biol., 10:193, 1990.
[0384] Klein et al., Nature, 327:70-73, 1987.
[0385] Koch et al., Mol. Cell. Biol., 9:303, 1989.
[0386] Kriegler and Botchan, In: Eukaryotic Viral Vectors, Gluzman (Ed.), Cold Spring Harbor: Cold Spring Harbor Laboratory, NY, 1982.
[0387] Kriegler and Botchan, Mol. Cell. Biol., 3:325, 1983.
[0388] Kriegler et al., Cell, 38:483, 1984.
[0389] Kriegler et al., Cell, 53:45, 1988.
[0390] Kuhl et al., Cell, 50:1057, 1987.
[0391] Kunz et al., Nucl. Acids Res., 17:1121, 1989.
[0392] LaPointe et al., Hypertension, 27(3):715-22, 1996
[0393] LaPointe et al., J. Biol. Chem., 263(19):9075-8, 1988.
[0394] Larsen et al., Proc. Natl. Acad. Sci. USA., 83:8283, 1986.
[0395] Laspia et al., Cell, 59:283, 1989.
[0396] Latimer et al., Mol. Cell. Biol., 10:760, 1990.
[0397] Le Gal La Salle et al., Science, 259:988-990, 1993.
[0398] Lee et al., Nature, 294:228, 1981.
[0399] Levinson et al., Nature, 295:79, 1982.
[0400] Levrero et al., Gene, 101:195-202, 1991.
[0401] Lin et al., Mol. Cell. Biol., 10:850, 1990.
[0402] Long et al., Science 345: 1184-1188, 2014.
[0403] Long et al., Science 351, 400-403, 2016.
[0404] Pinello et al., Nature Biotechnol. 34, 695-697, 2016.
[0405] Long et al., JAMA Neurol., 3388, 2016.
[0406] Long et al., Science 351, 400-403, 2016.
[0407] Luria et al., EMBO J., 6:3307, 1987.
[0408] Lusky and Botchan, Proc. Natl. Acad. Sci. USA, 83:3609, 1986.
[0409] Lusky et al., Mol. Cell. Biol., 3:1108, 1983.
[0410] Majors and Varmus, Proc. Natl. Acad. Sci. USA, 80:5866, 1983.
[0411] Mali et al., Science 339, 823-826, 2013a.
[0412] Mali et al., Nat Methods 10, 957-963, 2013b.
[0413] Mali et al., Nat. Biotechnol. 31:833-838, 2013c.
[0414] Mann et al., Cell, 33:153-159, 1983.
[0415] Maresca et al., Genome Research 23, 539-546, 2013.
[0416] Markowitz et al., J Virol., 62:1120-1124, 1988.
[0417] McNeall et al., Gene, 76:81, 1989.
[0418] Miksicek et al., Cell, 46:203, 1986.
[0419] Millay et al., Nat. Med. 14, 442-447, 2008.
[0420] Mojica et al., J Mol. Evol. 60, 174-182, 2005.
[0421] Mordacq and Linzer, Genes and Dev., 3:760, 1989.
[0422] Moreau et al., Nucl. Acids Res., 9:6047, 1981.
[0423] Moss et al., J. Gen. Physiol., 108(6):473-84, 1996.
[0424] Muesing et al., Cell, 48:691, 1987.
[0425] Nelson et al., Science 351, 403-407, 2016.
[0426] Nicolas and Rubinstein, In: Vectors: A survey of molecular cloning vectors and their uses, Rodriguez and Denhardt (Eds.), Stoneham: Butterworth, 494-513, 1988.
[0427] Nicolau and Sene, Biochim. Biophys. Acta, 721:185-190, 1982.
[0428] Nicolau et al., Methods Enzymol., 149:157-176, 1987.
[0429] Ondek et al., EMBO J., 6:1017, 1987.
[0430] Ornitz et al., Mol. Cell. Biol., 7:3466, 1987.
[0431] Padgett, R. A., Trends Genet. 28, 147-154, 2012.
[0432] Palmiter et al., Cell, 29:701, 1982a.
[0433] Palmiter et al., Nature, 300:611, 1982b.
[0434] Paskind et al., Virology, 67:242-248, 1975.
[0435] Pech et al., Mol. Cell. Biol., 9:396, 1989.
[0436] Perales et al., Proc. Natl. Acad. Sci. USA, 91(9):4086-4090, 1994.
[0437] Perez-Stable and Constantin, Mol. Cell. Biol., 10:1116, 1990.
[0438] Picard et al., Nature, 307:83, 1984.
[0439] Pinkert et al., Genes and Dev., 1:268, 1987.
[0440] Ponta et al., Proc. Natl. Acad. Sci. USA, 82:1020, 1985.
[0441] Porton et al., Mol. Cell. Biol., 10:1076, 1990.
[0442] Potter et al., Proc. Natl. Acad. Sci. USA, 81:7161-7165, 1984.
[0443] Queen and Baltimore, Cell, 35:741, 1983.
[0444] Quinn et al., Mol. Cell. Biol., 9:4713, 1989.
[0445] Racher et al., Biotech. Techniques, 9:169-174, 1995.
[0446] Ragot et al., Nature, 361:647-650, 1993.
[0447] Ran et al., Nature 520, 186-191, 2015.
[0448] Redondo et al., Science, 247:1225, 1990.
[0449] Reisman and Rotter, Mol. Cell. Biol., 9:3571, 1989.
[0450] Renan, Radiother. Oncol., 19:197-218, 1990.
[0451] Resendez Jr. et al., Mol. Cell. Biol., 8:4579, 1988.
[0452] Rich et al., Hum. Gene Ther., 4:461-476, 1993.
[0453] Ridgeway, In: Vectors: A survey of molecular cloning vectors and their uses, Stoneham: Butterworth, 467-492, 1988.
[0454] Ripe et al., Mol. Cell. Biol., 9:2224, 1989.
[0455] Rippe et al., Mol. Cell Biol., 10:689-695, 1990.
[0456] Riffling et al., Nuc. Acids Res., 17:1619, 1989.
[0457] Rosen et al., Cell, 41:813, 1988.
[0458] Rosenfeld et al., Cell, 68:143-155, 1992.
[0459] Rosenfeld et al., Science, 252:431-434, 1991.
[0460] Roux et al., Proc. Natl. Acad. Sci. USA, 86:9079-9083, 1989.
[0461] Sambrook and Russell, Molecular Cloning: A Laboratory Manual 3^{rd} Ed., Cold Spring Harbor Laboratory Press, 2001.
[0462] Sakai et al., Genes and Dev., 2:1144, 1988.
[0463] Satake et al., J Virology, 62:970, 1988.
[0464] Schaffner et al., J. Mol. Biol., 201:81, 1988.
[0465] Searle et al., Mol. Cell. Biol., 5:1480, 1985.
[0466] Sharp et al., Cell, 59:229, 1989.
[0467] Shaul and Ben-Levy, J. EMBO, 6:1913, 1987.
[0468] Sherman et al., Mol. Cell. Biol., 9:50, 1989.
[0469] Sleigh et al., J. EMBO, 4:3831, 1985.
[0470] Shimizu-Motohashi et al., Am J Transl Res 8, 2471-89, 2016.
[0471] Spalholz et al., Cell, 42:183, 1985.
[0472] Spandau and Lee, J. Virology, 62:427, 1988.
[0473] Spandidos and Wilkie, EMBO J., 2:1193, 1983.
[0474] Stephens and Hentschel, Biochem. 1, 248:1, 1987.
[0475] Stratford-Perricaudet and Perricaudet, In: Human Gene Transfer, Cohen-Haguenauer and Boiron (Eds.), John Libbey Eurotext, France, 51-61, 1991.
[0476] Stratford-Perricaudet et al., Hum. Gene. Ther., 1:241-256, 1990.
[0477] Stuart et al., Nature, 317:828, 1985.
[0478] Sullivan and Peterlin, Mol. Cell. Biol., 7:3315, 1987.
[0479] Swartzendruber and Lehman, J. Cell. Physiology, 85:179, 1975.
[0480] Tabebordbar et al., Science 351, 407-411, 2016.
[0481] Takebe et al., Mol. Cell. Biol., 8:466, 1988.
[0482] Tavernier et al., Nature, 301:634, 1983.
[0483] Taylor and Kingston, Mol. Cell. Biol., 10:165, 1990a.
[0484] Taylor and Kingston, Mol. Cell. Biol., 10:176, 1990b.
[0485] Taylor et al., J. Biol. Chem., 264:15160, 1989.
[0486] Temin, In: Gene Transfer, Kucherlapati (Ed.), NY, Plenum Press, 149-188, 1986.
[0487] Thiesen et al., J. Virology, 62:614, 1988.
[0488] Top et al., J. Infect. Dis., 124:155-160, 1971.
[0489] Tóth et al., Biology Direct, 1-14, 2016.
[0490] Tronche et al., Mol. Biol. Med., 7:173, 1990.
[0491] Trudel and Constantini, Genes and Dev. 6:954, 1987.
[0492] Tsai et al., Nature Biotechnology 34, 882-887, 2016.
[0493] Tur-Kaspa et al., Mol. Cell Biol., 6:716-718, 1986.
[0494] Tyndell et al., Nuc. Acids. Res., 9:6231, 1981.
[0495] Vannice and Levinson, J. Virology, 62:1305, 1988.
[0496] Varmus et al., Cell, 25:23-36, 1981.
[0497] Vasseur et al., Proc Natl. Acad. Sci. USA., 77:1068, 1980.
[0498] Wagner et al., Proc. Natl. Acad. Sci. USA, 87(9):3410-3414, 1990.
[0499] Wang and Calame, Cell, 47:241, 1986.
[0500] Wang et al., Cell, 153:910-910, 2013.
[0501] Weber et al., Cell, 36:983, 1984.
[0502] Weinberger et al. Mol. Cell. Biol., 8:988, 1984.
[0503] Winoto et al., Cell, 59:649, 1989.
[0504] Wong et al., Gene, 10:87-94, 1980.
[0505] Wu and Wu, Adv. Drug Delivery Rev., 12:159-167, 1993.
[0506] Wu and Wu, Biochemistry, 27:887-892, 1988.
[0507] Wu and Wu, J. Biol. Chem., 262:4429-4432, 1987.
[0508] Wu et al., Cell Stem Cell 13, 659-662, 2013.
[0509] Wu et al., Nat Biotechnol 32, 670-676, 2014.
[0510] Xu et al., Mol Ther 24, 564-569, 2016.
[0511] Yamauchi-Takihara et al., Proc. Natl. Acad. Sci. USA, 86(10):3504-3508, 1989.
[0512] Yang et al., Proc. Natl. Acad. Sci. USA, 87:9568-9572, 1990.
[0513] Yin et al., Nat Biotechnol 32, 551-553, 2014.
[0514] Yin et al., Physiol Rev 93, 23-67, 2013.
[0515] Young et al., Cell Stem Cell 18, 533-540, 2016.
[0516] Yutzey et al. Mol. Cell. Biol., 9:1397, 1989.
[0517] Zechner et al., Cell Metabolism 12, 633-642, 2010.
[0518] Zelenin et al., FEBS Lett., 280:94-96, 1991.
[0519] Zetsche et al., Cell 163, 759-771, 2015.
[0520] Ziober and Kramer, J. Bio. Chem., 271(37):22915-22922, 1996.

1. A method for editing a mutant dystrophin gene in a cardiomyocyte, the method comprising contacting the cardiomyocyte with:
a Cas9 nuclease, or a sequence encoding a Cas9 nuclease, and
a gRNA, or a sequence encoding a gRNA, wherein the gRNA targets a splice donor or splice acceptor site of the dystrophin gene.

2. The method of claim 1, wherein the gRNA targets a splice donor or splice acceptor site of exon 51, 45, 53, 44, 46, 52, 50, 43, 6, 7, 8, or 55.

3. The method of claim 1, wherein the gRNA comprises or targets a sequence of any one of SEQ ID NOs. 60-705, 712-862, 947-2377.

4. The method of claim 1, wherein a vector comprises the gRNA, or a sequence encoding the gRNA.

5. The method of claim 4, wherein the vector is a viral vector or a non-viral vector.

6. The method of claim 5, wherein the viral vector is an adeno-associated viral (AAV) vector.

7. The method of claim 6, wherein the AAV vector is selected from AAV1, AAV2, AAV3, AAV4, AAV5, AAV6, AAV7, AAV8, AAV9, AAV10, AAV11, AAV12, AAVRh74, AAV2i8, AAVRh10, AAV39, AAV43, AAVRh8, avian AAV, bovine AAV, canine AAV, equine AAV, and ovine AAV.

8. The method of claim 5, wherein the non-viral vector is a plasmid.

9. The method of claim 5, wherein the non-viral vector is a nanoparticle.

10. The method of claim 1, wherein a first vector comprises the gRNA, or a sequence comprising the gRNA, and a second vector comprises the Cas9, or a sequence comprising the Cas9.

11. The method of claim 10, wherein the first vector and the second vector are AAVs.

12. The method of claim 1, wherein the mutant dystrophin gene comprises a point mutation.

13. The method of claim 12, wherein the point mutation is a pseudo-exon mutation.

14. The method of claim 1, wherein the mutant dystrophin gene comprises a deletion.

15. The method of claim 1, wherein the mutant dystrophin gene comprises a duplication mutation.

16. The method of claim 1, wherein the Cas9 nuclease is isolated or derived from a Streptococcus pyogenes (spCas9).

17. The method of claim 1, wherein the Cas9 nuclease is isolated or derived from a Staphylococcus aureus (saCas9).

18. A cardiomyocyte produced according to the method of claim 1, wherein the cardiomyocyte expresses a dystrophin protein.

19. The cardiomyocyte of claim 18, wherein the cardiomyocyte is derived from an induced pluripotent stem cell (iPSC).

20. A composition comprising a therapeutically effective amount of the cardiomyocyte of claim 18.

21. A method for treating or preventing Duchene Muscular Dystrophy (DMD) in a subject in need thereof, the method comprising administering to the subject a therapeutically effective amount of a composition of claim 20.

22. The method of claim 21, wherein the therapeutically effective amount at least partially or completely restores cardiac contractility in the patient.

23. An induced pluripotent stem cell (iPSC) comprising:
a Cas9 nuclease, or a sequence encoding a Cas9 nuclease, and
a gRNA, or a sequence encoding a gRNA,
wherein the gRNA targets a splice donor or splice acceptor site of the dystrophin gene.

24. A composition comprising a cardiomyocyte derived from the iPSC of claim 23.

25. A method for treating or preventing Duchene Muscular Dystrophy (DMD) in a subject in need thereof, the method comprising administering to the subject a therapeutically effective amount of the composition of claim 24.

26. The method of claim 25, wherein the therapeutically effective amount at least partially or completely restores cardiac contractility in the patient.

27. A method for treating or preventing Duchene Muscular Dystrophy (DMD) in a subject in need thereof, the method comprising administering to the subject:
a Cas9 nuclease, or a sequence encoding a Cas9 nuclease, and
a gRNA, or a sequence encoding a gRNA, wherein the gRNA targets a splice donor or splice acceptor site of the dystrophin gene;
wherein the administering restores dystrophin expression in at least 10% of the subject's cardiomyocytes.

28. The method of claim 27, wherein the gRNA targets a splice donor or splice acceptor site of exon 51, 45, 53, 44, 46, 52, 50, 43, 6, 7, 8, or 55.

29. The method of claim 27, wherein the gRNA comprises or targets a sequence of any one of SEQ ID NOs. 60-705, 712-862, or 947-2377.

30. The method of claim 27, wherein a vector comprises the gRNA, or a sequence encoding the gRNA.

31. The method of claim 30, wherein the vector is a viral vector or a non-viral vector.

32. The method of claim 31, wherein the viral vector is an adeno-associated viral (AAV) vector.

33. The method of claim 32, wherein the AAV vector is selected from an AAV1, AAV2, AAV3, AAV4, AAV5, AAV6, AAV7, AAV8, AAV9, AAV10, AAV11, AAV12, AAVRh74, AAV2i8, AAVRh10, AAV39, AAV43, AAVRh8, avian AAV, bovine AAV, canine AAV, equine AAV, and ovine AAV.

34. The method of claim 31, wherein the non-viral vector is a plasmid.

35. The method of claim 31, wherein the non-viral vector is a nanoparticle.

36. The method of claim 27, wherein a first vector comprises the gRNA, or a sequence encoding the gRNA, and a second vector comprises the Cas9, or a sequence encoding the Cas9.

37. The method of claim 36, wherein the first vector and the second vector are AAVs.

38. The method of claim 27, wherein the mutant dystrophin gene comprises a point mutation.

39. The method of claim 38, wherein the point mutation is a pseudo-exon mutation.

40. The method of claim 27, wherein the mutant dystrophin gene comprises a deletion.

41. The method of claim 27, wherein the mutant dystrophin gene comprises a duplication mutation.

42. The method of claim 27, wherein the Cas9 nuclease is isolated or derived from a Streptococcus pyogenes (spCas9).

43. The method of claim 27, wherein the Cas9 nuclease is isolated or derived from a Staphylococcus aureus Cas9 (saCas9).

44. The method of claim 27, wherein the subject suffers from dilated cardiomyopathy.

45. The method of claim 27, wherein the administering restores dystrophin expression in at least 30% of the subject's cardiomyocytes.

46. The method of claim 27, wherein the administering at least partially rescues cardiac contractility.

47. The method of claim 27, wherein the administering restores dystrophin expression in at least 50% of the subject's cardiomyocytes.

48. The method of claim 27, wherein the administering completely rescues cardiac contractility.

49. A method for treating or preventing Duchene Muscular Dystrophy (DMD) in a subject in need thereof, the method comprising:
contacting an induced pluripotent stem cell (iPSC) with
a Cas9 nuclease, or a sequence encoding a Cas9 nuclease, and
a gRNA, or a sequence encoding a gRNA,
wherein the gRNA targets a splice donor or splice acceptor site of the dystrophin gene;
differentiating the iPSC into a cardiomyocyte; and
administering the cardiomyocyte to the subject.

The application's sequence listing, which the Patent Office published only in electronic form, follows.

SEQUENCE LISTING (2569 sequences)

SEQ ID NO: 1 - DNA, 63 bp, Artificial Sequence
  source: /note="Description of Artificial Sequence: Synthetic oligonucleotide"
tataaggaaaaaccaagcactcagccagtgaagctgccagtcagactgttactctagtgacac

SEQ ID NO: 2 - protein, 18 aa, Artificial Sequence
  source: /note="Description of Artificial Sequence: Synthetic peptide"
YKEKPSTQPVKLPVRLLL

SEQ ID NO: 3 - DNA, 18 bp, Artificial Sequence
  source: /note="Description of Artificial Sequence: Synthetic oligonucleotide"
ccagtgaaggcaacactg

SEQ ID NO: 4 - protein, 6 aa, Artificial Sequence
  source: /note="Description of Artificial Sequence: Synthetic peptide"
QPVKAT

SEQ ID NO: 5 - protein, 3685 aa, Homo sapiens
MLWWEEVEDCYEREDVQKKTFTKWVNAQFSKFGKQHIENLFSDLQDGRRLLDLLEGLTGQKLPKEKGSTRVHALNNVNKALRVLQNNNVDLVNIGSTDIVDGNHKLTLGLIWNIILHWQVKNVMKNIMAGLQQTNSEKILLSWVRQSTRNYPQVNVINFTTSWSDGLALNALIHSHRPDLFDWNSVVCQQSATQRLEHAFNIARYQLGIEKLLDPEDVDTTYPDKKSILMYITSLFQVLPQQVSIEAIQEVEMLPRPPKVTKEEHFQLHHQMHYSQQITVSLAQGYERTSSPKPRFKSYAYTQAAYVTTSDPTRSPFPSQHLEAPEDKSFGSSLMESEVNLDRYQTALEEVLSWLLSAEDTLQAQGEISNDVEVVKDQFHTHEGYMMDLTAHQGRVGNILQLGSKLIGTGKLSEDEETEVQEQMNLLNSRWECLRVASMEKQSNLHRVLMDLQNQKLKELNDWLTKTEERTRKMEEEPLGPDLEDLKRQVQQHKVLQEDLEQEQVRVNSLTHMVVVVDESSGDHATAALEEQLKVLGDRWANICRWTEDRWVLLQDILLKWQRLTEEQCLFSAWLSEKEDAVNKIHTTGFKDQNEMLSSLQKLAVLKADLEKKKQSMGKLYSLKQDLLSTLKNKSVTQKTEAWLDNFARCWDNLVQKLEKSTAQISQAVTTTQPSLTQTTVMETVTTVTTREQILVKHAQEELPPPPPQKKRQITVDSEIRKRLDVDITELHSWITRSEAVLQSPEFAIFRKEGNFSDLKEKVNAIEREKAEKFRKLQDASRSAQALVEQMVNEGVNADSIKQASEQLNSRWIEFCQLLSERLNWLEYQNNIIAFYNQLQQLEQMTTTAENWLKIQPTTPSEPTAIKSQLKICKDEVNRLSGLQPQIERLKIQSIALKEKGQGPMFLDADFVAFTNHFKQVFSDVQAREKELQTIFDTLPPMRYQETMSAIRTWVQQSETKLSIPQLSVTDYEIMEQRLGELQALQSSLQEQQSGLYYLSTTVKEMSKKAPSEISRKYQSEFEEIEGRWKKLSSQLVEHCQKLEEQMNKLRKIQNHIQTLKKWMAEVDVFLKEEWPALGDSEILKKQLKQCRLLVSDIQTIQPSLNSVNEGGQKIKNEAEPEFASRLETELKELNTQWDHMCQQVYARKEALKGGLEKTVSLQKDLSEMHEWMTQAEEEYLERDFEYKTPDELQKAVEEMKRAKEEAQQKEAKVKLLTESVNSVIAQAPPVAQEALKKELETLTTNYQWLCTRLNGKCKTLEEVWACWHELLSYLEKANKWLNEVEFKLKTTENIPGGAEEISEVLDSLENLMRHSEDNPNQIRILAQTLTDGGVMDELINEELETFNSRWRELHEEAVRRQKLLEQSIQSAQETEKSLHLIQESLTFIDKQLAAYIADKVDAAQMPQEAQKIQSDLTSHEISLEEMKKHNQGKEAAQRVLSQIDVAQKKLQDVSMKFRLFQKPANFELRLQESKMILDEVKMHLPALETKSVEQEVVQSQLNHCVNLYKSLSEVKSEVEMVIKTGRQIVQKKQTENPKELDERVTALKLHYNELGAKVTERKQQLEKCLKLSRKMRKEMNVLTEWLAATDMELTKRSAVEGMPSNLDSEVAWGKATQKEIEKQKVHLKSITEVGEALKTVLGKKETLVEDKLSLLNSNWIAVTSRAEEWLNLLLEYQKHMETFDQNVDHITKWIIQADTLLDESEKKKPQQKEDVLKRLKAELNDIRPKVDSTRDQAANLMANRGDHCRKLVEPQISELNHRFAAISHRIKTGKASIPLKELEQFNSDIQKLLEPLEAEIQQGVNLKEEDFNKDMNEDNEGTVKELLQRGDNLQQRITDERKREEIKIKQQLLQTKHNALKDLRSQRRKKALEISHQWYQYKRQADDLLKCLDDIEKKLASLPEPRDERKIKEIDRELQKKKEELNAVRRQAEGLSEDGAAMAVEPTQIQLSKRWREIESKFAQFRRLNFAQIHTVREETMMVMTEDMPLEISYVPSTYLTEITHVSQALLEVEQLLNAPDLCAKDFEDLFKQEESLKNIKDSLQQSSGRIDIIHSKKTAALQSATPVERVKLQEALSQLDFQWEKVNKMYKDRQGRFDRSVEKWRRFHYDIKIFNQWLTEAEQFLRKTQIPENWEHAKYKWYLKELQDGIGQRQTVVRTLNATGEEIIQQSSKTDASILQEKLGSLNLRWQEVCKQLSDRKKRLEEQKNILSEFQRDLNEFVLWLEEADNIASIPLEPGKEQQLKEKLEQVKLLVEELPLRQGILKQLNETGGPVLVSAPISPEEQDKLENKLKQTNLQWIKVSRALPEKQGEIEAQIKDLGQLEKKLEDLEEQLNHLLLWLSPIRNQLEIYNQPNQEGPFDVQETEIAVQAKQPDVEEILSKGQHLYKEKPATQPVKRKLEDLSSEWKAVNRLLQELRAKQPDLAPGLTTIGASPTQTVTLVTQPVVTKETAISKLEMPSSLMLEVPALADFNRAWTELTDWLSLLDQVIKSQRVMVGDLEDINEMIIKQKATMQDLEQRRPQLEELITAAQNLKNKTSNQEARTIITDRIERIQNQWDEVQEHLQNRRQQLNEMLKDSTQWLEAKEEAEQVLGQARAKLESWKEGPYTVDAIQKKITETKQLAKDLRQWQTNVDVANDLALKLLRDYSADDTRKVHMITENINASWRSIHKRVSEREAALEETHRLLQQFPLDLEKFLAWLTEAETTANVLQDATRKERLLEDSKGVKELMKQWQDLQGEIEAHTDVYHNLDENSQKILRSLEGSDDAVLLQRRLDNMNFKWSELRKKSLNIRSHLEASSDQWKRLHLSLQELLVWLQLKDDELSRQAPIGGDFPAVQKQNDVHRAFKRELKTKEPVIMSTLETVRIFLTEQPLEGLEKLYQEPRELPPEERAQNVTRLLRKQAEEVNTEWEKLNLHSADWQRKIDETLERLQELQEATDELDLKLRQAEVIKGSWQPVGDLLIDSLQDHLEKVKALRGEIAPLKENVSHVNDLARQLTTLGIQLSPYNLSTLEDLNTRWKLLQVAVEDRVRQLHEAHRDFGPASQHFLSTSVQGPWERAISPNKVPYYINHETQTTCWDHPKMTELYQSLADLNNVRFSAYRTAMKLRRLQKALCLDLLSLSAACDALDQHNLKQNDQPMDILQIINCLTTIYDRLEQEHNNLVNVPLCVDMCLNWLLNVYDTGRTGRIRVLSFKTGIISLCKAHLEDKYRYLFKQVASSTGFCDQRRLGLLLHDSIQIPRQLGEVASFGGSNIEPSVRSCFQFANNKPEIEAALFLDWMRLEPQSMVWLPVLHRVAAAETAKHQAKCNICKECPIIGFRYRSLKHFNYDICQSCFFSGRVAKGHKMHYPMVEYCTPTTSGEDVRDFAKVLKNKFRTKRYFAKHPRMGYLPVQTVLEGDNMETPVTLINFWPVDSAPASSPQLSHDDTHSRIEHYASRLAEMENSNGSYLNDSISPNESIDDEHLLIQHYCQSLNQDSPLSQPRSPAQILISLESEERGELERILADLEEENRNLQAEYDRLKQQHEHKGLSPLPSPPEMMPTSPQSPRDAELIAEAKLLRQHKGRLEARMQILEDHNKQLESQLHRLRQLLEQPQAEAKVNGTTVSSPSTSLQRSDSSQPMLLRVVGSQTSDSMGEEDLLSPPQDTSTGLEEVMEQLNNSFPSSRGRNTPGKPMREDTM

SEQ ID NO: 6 - DNA, 14069 bp, Homo sapiens
cgttaaatgcaaacgctgctctggctcatgtgtttgctccgaggtataggttttgttcgactgacgtatcagatagtcagagtggttaccacaccgacgttgtagcagctgcataataaatgactgaaagaatcatgttaggcatgcccacctaacctaacttgaatcatgcgaaaggggagctgttggaattcaaatagactttctggttcccagcagtcggcagtaatagaatgctttcaggaagatgacagaatcaggagaaagatgctgttttgcactatcttgatttgttacagcagccaacttattggcatgatggagtgacaggaaaaacagctggcatggaagatgaaagagaagatgttcaaaagaaaacattcacaaaatgggtaaatgcacaattttctaagtttgggaagcagcatattgagaacctcttcagtgacctacaggatgggaggcgcctcctagacctcctcgaaggcctgacagggcaaaaactgccaaaagaaaaaggatccacaagagttcatgccctgaacaatgtcaacaaggcactgcgggttttgcagaacaataatgttgatttagtgaatattggaagtactgacatcgtagatggaaatcataaactgactcttggtttgatttggaatataatcctccactggcaggtcaaaaatgtaatgaaaaatatcatggctggattgcaacaaaccaacagtgaaaagattctcctgagctgggtccgacaatcaactcgtaattatccacaggttaatgtaatcaacttcaccaccagctggtctgatggcctggctttgaatgctctcatccatagtcataggccagacctatttgactggaatagtgtggtttgccagcagtcagccacacaacgactggaacatgcattcaacatcgccagatatcaattaggcatagagaaactactcgatcctgaagatgttgataccacctatccagataagaagtccatcttaatgtacatcacatcactcttccaagttttgcctcaacaagtgagcattgaagccatccaggaagtggaaatgttgccaaggccacctaaagtgactaaagaagaacattttcagttacatcatcaaatgcactattctcaacagatcacggtcagtctagcacagggatatgagagaacttcttcccctaagcctcgattcaagagctatgcctacacacaggctgcttatgtcaccacctctgaccctacacggagcccatttccttcacagcatttggaagctcctgaagacaagtcatttggcagttcattgatggagagtgaagtaaacctggaccgttatcaaacagctttagaagaagtattatcgtggcttctttctgctgaggacacattgcaagcacaaggagagatttctaatgatgtggaagtggtgaaagaccagtttcatactcatgaggggtacatgatggatttgacagcccatcagggccgggttggtaatattctacaattgggaagtaagctgattggaacaggaaaattatcagaagatgaagaaactgaagtacaagagcagatgaatctcctaaattcaagatgggaatgcctcagggtagctagcatggaaaaacaaagcaatttacatagagttttaatggatctccagaatcagaaactgaaagagttgaatgactggctaacaaaaacagaagaaagaacaaggaaaatggaggaagagcctcttggacctgatcttgaagacctaaaacgccaagtacaacaacataaggtgcttcaagaagatctagaacaagaacaagtcagggtcaattctctcactcacatggtggtggtagttgatgaatctagtggagatcacgcaactgctgctttggaagaacaacttaaggtattgggagatcgatgggcaaacatctgtagatggacagaagaccgctgggttcttttacaagacatccttctcaaatggcaacgtcttactgaagaacagtgcctttttagtgcatggctttcagaaaaagaagatgcagtgaacaagattcacacaactggctttaaagatcaaaatgaaatgttatcaagtcttcaaaaactggccgttttaaaagcggatctagaaaagaaaaagcaatccatgggcaaactgtattcactcaaacaagatcttctttcaacactgaagaataagtcagtgacccagaagacggaagcatggctggataactttgcccggtgttgggataatttagtccaaaaacttgaaaagagtacagcacagatttcacaggctgtcaccaccactcagccatcactaacacagacaactgtaatggaaacagtaactacggtgaccacaagggaacagatcctggtaaagcatgctcaagaggaacttccaccaccacctccccaaaagaagaggcagattactgtggattctgaaattaggaaaaggttggatgttgatataactgaacttcacagctggattactcgctcagaagctgtgttgcagagtcctgaatttgcaatctttcggaaggaaggcaacttctcagacttaaaagaaaaagtcaatgccatagagcgagaaaaagctgagaagttcagaaaactgcaagatgccagcagatcagctcaggccctggtggaacagatggtgaatgagggtgttaatgcagatagcatcaaacaagcctcagaacaactgaacagccggtggatcgaattctgccagttgctaagtgagagacttaactggctggagtatcagaacaacatcatcgctttctataatcagctacaacaattggagcagatgacaactactgctgaaaactggttgaaaatccaacccaccaccccatcagagccaacagcaattaaaagtcagttaaaaatttgtaaggatgaagtcaaccggctatcaggtcttcaacctcaaattgaacgattaaaaattcaaagcatagccctgaaagagaaaggacaaggacccatgttcctggatgcagactttgtggcctttacaaatcattttaagcaagtcttttctgatgtgcaggccagagagaaagagctacagacaatttttgacactttgccaccaatgcgctatcaggagaccatgagtgccatcaggacatgggtccagcagtcagaaaccaaactctccatacctcaacttagtgtcaccgactatgaaatcatggagcagagactcggggaattgcaggctttacaaagttctctgcaagagcaacaaagtggcctatactatctcagcaccactgtgaaagagatgtcgaagaaagcgccctctgaaattagccggaaatatcaatcagaatttgaagaaattgagggacgctggaagaagctctcctcccagctggttgagcattgtcaaaagctagaggagcaaatgaataaactccgaaaaattcagaatcacatacaaaccctgaagaaatggatggctgaagttgatgtttttctgaaggaggaatggcctgcccttggggattcagaaattctaaaaaagcagctgaaacagtgcagacttttagtcagtgatattcagacaattcagcccagtctaaacagtgtcaatgaaggtgggcagaagataaagaatgaagcagagccagagtttgcttcgagacttgagacagaactcaaagaacttaacactcagtgggatcacatgtgccaacaggtctatgccagaaaggaggccttgaagggaggtttggagaaaactgtaagcctccagaaagatctatcagagatgcacgaatggatgacacaagctgaagaagagtatcttgagagagattttgaatataaaactccagatgaattacagaaagcagttgaagagatgaagagagctaaagaagaggcccaacaaaaagaagcgaaagtgaaactccttactgagtctgtaaatagtgtcatagctcaagctccacctgtagcacaagaggccttaaaaaaggaacttgaaactctaaccaccaactaccagtggctctgcactaggctgaatgggaaatgcaagactttggaagaagtttgggcatgttggcatgagttattgtcatacttggagaaagcaaacaagtggctaaatgaagtagaatttaaacttaaaaccactgaaaacattcctggcggagctgaggaaatctctgaggtgctagattcacttgaaaatttgatgcgacattcagaggataacccaaatcagattcgcatattggcacagaccctaacagatggcggagtcatggatgagctaatcaatgaggaacttgagacatttaattctcgttggagggaactacatgaagaggctgtaaggaggcaaaagttgcttgaacagagcatccagtctgcccaggagactgaaaaatccttacacttaatccaggagtccctcacattcattgacaagcagttggcagcttatattgcagacaaggtggacgcagctcaaatgcctcaggaagcccagaaaatccaatctgatttgacaagtcatgagatcagtttagaagaaatgaagaaacataatcaggggaaggaggctgcccaaagagtcctgtctcagattgatgttgcacagaaaaaattacaagatgtctccatgaagtttcgattattccagaaaccagccaattttgagcagcgtctacaagaaagtaagatgattttagatgaagtgaagatgcacttgcctgcattggaaacaaagagtgtggaacaggaagtagtacagtcacagctaaatcattgtgtgaacttgtataaaagtctgagtgaagtgaagtctgaagtggaaatggtgataaagactggacgtcagattgtacagaaaaagcagacggaaaatcccaaagaacttgatgaaagagtaacagctttgaaattgcattataatgagctgggagcaaaggtaacagaaagaaagcaacagttggagaaatgcttgaaattgtcccgtaagatgcgaaaggaaatgaatgtcttgacagaatggctggcagctacagatatggaattgacaaagagatcagcagttgaaggaatgcctagtaatttggattctgaagttgcctggggaaaggctactcaaaaagagattgagaaacagaaggtgcacctgaagagtatcacagaggtaggagaggccttgaaaacagttttgggcaagaaggagacgttggtggaagataaactcagtcttctgaatagtaactggatagctgtcacctcccgagcagaagagtggttaaatcttttgttggaataccagaaacacatggaaacttttgaccagaatgtggaccacatcacaaagtggatcattcaggctgacacacttttggatgaatcagagaaaaagaaaccccagcaaaaagaagacgtgcttaagcgtttaaaggcagaactgaatgacatacgcccaaaggtggactctacacgtgaccaagcagcaaacttgatggcaaaccgcggtgaccactgcaggaaattagtagagccccaaatctcagagctcaaccatcgatttgcagccatttcacacagaattaagactggaaaggcctccattcctttgaaggaattggagcagtttaactcagatatacaaaaattgcttgaaccactggaggctgaaattcagcagggggtgaatctgaaagaggaagacttcaataaagatatgaatgaagacaatgagggtactgtaaaagaattgttgcaaagaggagacaacttacaacaaagaatcacagatgagagaaagcgagaggaaataaagataaaacagcagctgttacagacaaaacataatgctctcaaggatttgaggtctcaaagaagaaaaaaggctctagaaatttctcatcagtggtatcagtacaagaggcaggctgatgatctcctgaaatgcttggatgacattgaaaaaaaattagccagcctacctgagcccagagatgaaaggaaaataaaggaaattgatcgggaattgcagaagaagaaagaggagctgaatgcagtgcgtaggcaagctgagggcttgtctgaggatggggccgcaatggcagtggagccaactcagatccagctcagcaagcgctggcgggaaattgagagcaaatttgctcagtttcgaagactcaactttgcacaaattcacactgtccgtgaagaaacgatgatggtgatgactgaagacatgcctttggaaatttcttatgtgccttctacttatttgactgaaatcactcatgtctcacaagccctattagaagtggaacaacttctcaatgctcctgacctctgtgctaaggactttgaagatctctttaagcaagaggagtctctgaagaatataaaagatagtctacaacaaagctcaggtcggattgacattattcatagcaagaagacagcagcattgcaaagtgcaacgcctgtggaaagggtgaagctacaggaagctctctcccagcttgatttccaatgggaaaaagttaacaaaatgtacaaggaccgacaagggcgatttgacagatctgttgagaaatggcggcgttttcattatgatataaagatatttaatcagtggctaacagaagctgaacagtttctcagaaagacacaaattcctgagaattgggaacatgctaaatacaaatggtatcttaaggaactccaggatggcattgggcagcggcaaactgttgtcagaacattgaatgcaactggggaagaaataattcagcaatcctcaaaaacagatgccagtattctacaggaaaaattgggaagcctgaatctgcggtggcaggaggtctgcaaacagctgtcagacagaaaaaagaggctagaagaacaaaagaatatcttgtcagaatttcaaagagatttaaatgaatttgttttatggttggaggaagcagataacattgctagtatcccacttgaacctggaaaagagcagcaactaaaagaaaagcttgagcaagtcaagttactggtggaagagttgcccctgcgccagggaattctcaaacaattaaatgaaactggaggacccgtgcttgtaagtgctcccataagcccagaagagcaagataaacttgaaaataagctcaagcagacaaatctccagtggataaaggtttccagagctttacctgagaaacaaggagaaattgaagctcaaataaaagaccttgggcagcttgaaaaaaagcttgaagaccttgaagagcagttaaatcatctgctgctgtggttatctcctattaggaatcagttggaaatttataaccaaccaaaccaagaaggaccatttgacgttcaggaaactgaaatagcagttcaagctaaacaaccggatgtggaagagattttgtctaaagggcagcatttgtacaaggaaaaaccagccactcagccagtgaagaggaagttagaagatctgagctctgagtggaaggcggtaaaccgtttacttcaagagctgagggcaaagcagcctgacctagctcctggactgaccactattggagcctctcctactcagactgttactctggtgacacaacctgtggttactaaggaaactgccatctccaaactagaaatgccatcttccttgatgttggaggtacctgctctggcagatttcaaccgggcttggacagaacttaccgactggctttctctgcttgatcaagttataaaatcacagagggtgatggtgggtgaccttgaggatatcaacgagatgatcatcaagcagaaggcaacaatgcaggatttggaacagaggcgtccccagttggaagaactcattaccgctgcccaaaatttgaaaaacaagaccagcaatcaagaggctagaacaatcattacggatcgaattgaaagaattcagaatcagtgggatgaagtacaagaacaccttcagaaccggaggcaacagttgaatgaaatgttaaaggattcaacacaatggctggaagctaaggaagaagctgagcaggtcttaggacaggccagagccaagcttgagtcatggaaggagggtccctatacagtagatgcaatccaaaagaaaatcacagaaaccaagcagttggccaaagacctccgccagtggcagacaaatgtagatgtggcaaatgacttggccctgaaacttctccgggattattctgcagatgataccagaaaagtccacatgataacagagaatatcaatgcctcttggagaagcattcataaaagggtgagtgagcgagaggctgctttggaagaaactcatagattactgcaacagttccccctggacctggaaaagtttcttgcctggcttacagaagctgaaacaactgccaatgtcctacaggatgctacccgtaaggaaaggctcctagaagactccaagggagtaaaagagctgatgaaacaatggcaagacctccaaggtgaaattgaagctcacacagatgtttatcacaacctggatgaaaacagccaaaaaatcctgagatccctggaaggttccgatgatgcagtcctgttacaaagacgtttggataacatgaacttcaagtggagtgaacttcggaaaaagtctctcaacattaggtcccatttggaagccagttctgaccagtggaagcgtctgcacctttctctgcaggaacttctggtgtggctacagctgaaagatgatgaattaagccggcaggcacctattggaggcgactttccagcagttcagaagcagaacgatgtacatagggccttcaagagggaattgaaaactaaagaacctgtaatcatgagtactcttgagactgtacgaatatttctgacagagcagcctttggaaggactagagaaactctaccaggagcccagagagctgcctcctgaggagagagcccagaatgtcactcggcttctacgaaagcaggctgaggaggtcaatactgagtgggaaaaattgaacctgcactccgctgactggcagagaaaaatagatgagacccttgaaagactccaggaacttcaagaggccacggatgagctggacctcaagctgcgccaagctgaggtgatcaagggatcctggcagcccgtgggcgatctcctcattgactctctccaagatcacctcgagaaagtcaaggcacttcgaggagaaattgcgcctctgaaagagaacgtgagccacgtcaatgaccttgctcgccagcttaccactttgggcattcagctctcaccgtataacctcagcactctggaagacctgaacaccagatggaagcttctgcaggtggccgtcgaggaccgagtcaggcagctgcatgaagcccacagggactttggtccagcatctcagcactttctttccacgtctgtccagggtccctgggagagagccatctcgccaaacaaagtgccctactatatcaaccacgagactcaaacaacttgctgggaccatcccaaaatgacagagctctaccagtctttagctgacctgaataatgtcagattctcagcttataggactgccatgaaactccgaagactgcagaaggccctttgcttggatctcttgagcctgtcagctgcatgtgatgccttggaccagcacaacctcaagcaaaatgaccagcccatggatatcctgcagattattaattgtttgaccactatttatgaccgcctggagcaagagcacaacaatttggtcaacgtccctctctgcgtggatatgtgtctgaactggctgctgaatgtttatgatacgggacgaacagggaggatccgtgtcctgtcttttaaaactggcatcatttccctgtgtaaagcacatttggaagacaagtacagataccttttcaagcaagtggcaagttcaacaggattttgtgaccagcgcaggctgggcctccttctgcatgattctatccaaattccaagacagttgggtgaagttgcatcctttgggggcagtaacattgagccaagtgtccggagctgcttccaatttgctaataataagccagagatcgaagcggccctcttcctagactggatgagactggaaccccagtccatggtgtggctgcccgtcctgcacagagtggctgctgcagaaactgccaagcatcaggccaaatgtaacatctgcaaagagtgtccaatcattggattcaggtacaggagtctaaagcactttaattatgacatctgccaaagctgctttttttctggtcgagttgcaaaaggccataaaatgcactatcccatggtggaatattgcactccgactacatcaggagaagatgttcgagactttgccaaggtactaaaaaacaaatttcgaaccaaaaggtattttgcgaagcatccccgaatgggctacctgccagtgcagactgtcttagagggggacaacatggaaactcccgttactctgatcaacttctggccagtagattctgcgcctgcctcgtcccctcagctttcacacgatgatactcattcacgcattgaacattatgctagcaggctagcagaaatggaaaacagcaatggatcttatctaaatgatagcatctctcctaatgagagcatagatgatgaacatttgttaatccagcattactgccaaagtttgaaccaggactcccccctgagccagcctcgtagtcctgcccagatcttgatttccttagagagtgaggaaagaggggagctagagagaatcctagcagatcttgaggaagaaaacaggaatctgcaagcagaatatgaccgtctaaagcagcagcacgaacataaaggcctgtccccactgccgtcccctcctgaaatgatgcccacctctccccagagtccccgggatgctgagctcattgctgaggccaagctactgcgtcaacacaaaggccgcctggaagccaggatgcaaatcctggaagaccacaataaacagctggagtcacagttacacaggctaaggcagctgctggagcaaccccaggcagaggccaaagtgaatggcacaacggtgtcctctccttctacctctctacagaggtccgacagcagtcagcctatgctgctccgagtggttggcagtcaaacttcggactccatgggtgaggaagatcttctcagtcctccccaggacacaagcacagggttagaggaggtgatggagcaactcaacaactccttccctagttcaagaggaagaaatacccctggaaagccaatgagagaggacacaatgtaggaagtcttttccacatggcagatgatttgggcagagcgatggagtccttagtatcagtcatgacagatgaagaaggagcagaataaatgttttacaactcctgattcccgcatggtttttataatattcatacaacaaagaggattagacagtaagagtttacaagaaataaatctatatttttgtgaagggtagtggtattatactgtagatttcagtagtttctaagtctgttattgttttgttaacaatggcaggttttacacgtctatgcaattgtacaaaaaagttataagaaaactacatgtaaaatcttgatagctaaataacttgccatttctttatatggaacgcattttgggttgtttaaaaatttataacagttataaagaaagattgtaaactaaagtgtgctttataaaaaaaagttgtttataaaaacccctaaaaacaaaacaaacacacacacacacacatacacacacacacacaaaactttgaggcagcgcattgttttgcatccttttggcgtgatatccatatgaaattcatggctttttctttttttgcatattaaagataagacttcctctaccaccacaccaaatgactactacacactgctcatttgagaactgtcagctgagtggggcaggcttgagttttcatttcatatatctatatgtctataagtatataaatactatagttatatagataaagagatacgaatttctatagactgactttttccattttttaaatgttcatgtcacatcctaatagaaagaaattacttctagtcagtcatccaggcttacctgcttggtctagaatggatttttcccggagccggaagccaggaggaaactacaccacactaaaacattgtctacagctccagatgtttctcattttaaacaactttccactgacaacgaaagtaaagtaaagtattggatttttttaaagggaacatgtgaatgaatacacaggacttattatatcagagtgagtaatcggttggttggttgattgattgattgattgatacattcagcttcctgctgctagcaatgccacgatttagatttaatgatgcttcagtggaaatcaatcagaaggtattctgaccttgtgaacatcagaaggtattttttaactcccaagcagtagcaggacgatgatagggctggagggctatggattcccagcccatccctgtgaaggagtaggccactctttaagtgaaggattggatgattgttcataatacataaagttctctgtaattacaactaaattattatgccctcttctcacagtcaaaaggaactgggtggtttggtttttgttgcttttttagatttattgtcccatgtgggatgagtttttaaatgccacaagacataatttaaaataaataaactttgggaaaaggtgtaaaacagtagccccatcacatttgtgatactgacaggtatcaacccagaagcccatgaactgtgtttccatcctttgcatttctctgcgagtagttccacacaggtttgtaagtaagtaagaaagaaggcaaattgattcaaatgttacaaaaaaacccttcttggtggattagacaggttaaatatataaacaaacaaacaaaaattgctcaaaaaagaggagaaaagctcaagaggaaaagctaaggactggtaggaaaaagctttactctttcatgccattttatttctttttgatttttaaatcattcattcaatagataccaccgtgtgacctataattttgcaaatctgttacctctgacatcaagtgtaattagcttttggagagtgggctgacatcaagtgtaattagcttttggagagtgggttttgtccattattaataattaattaattaacatcaaacacggcttctcatgctatttctacctcactttggttttggggtgttcctgataattgtgcacacctgagttcacagcttcaccacttgtccattgcgttattttctttttcctttataattctttctttttccttcataattttcaaaagaaaacccaaagctctaaggtaacaaattaccaaattacatgaagatttggtttttgtcttgcatttttttcctttatgtgacgctggaccttttctttacccaaggatttttaaaactcagatttaaaacaaggggttactttacatcctactaagaagtttaagtaagtaagtttcattctaaaatcagaggtaaatagagtgcataaataattttgttttaatctttttgtttttcttttagacacattagctctggagtgagtctgtcataatatttgaacaaaaattgagagctttattgctgcattttaagcataattaatttggacattatttcgtgttgtgttctttataaccaccaagtattaaactgtaaatcataatgtaactgaagcataaacatcacatggcatgttttgtcattgttttcaggtactgagttcttacttgagtatcataatatattgtgttttaacaccaacactgtaacatttacgaattatttttttaaacttcagttttactgcattttcacaacatatcagacttcaccaaatatatgccttactattgtattatagtactgctttactgtgtatctcaataaagcacgcagttatgttac

SEQ ID NO: 7 - protein, 3677 aa, Homo sapiens
MEDEREDVQKKTFTKWVNAQFSKFGKQHIENLFSDLQDGRRLLDLLEGLTGQKLPKEKGSTRVHALNNVNKALRVLQNNNVDLVNIGSTDIVDGNHKLTLGLIWNIILHWQVKNVMKNIMAGLQQTNSEKILLSWVRQSTRNYPQVNVINFTTSWSDGLALNALIHSHRPDLFDWNSVVCQQSATQRLEHAFNIARYQLGIEKLLDPEDVDTTYPDKKSILMYITSLFQVLPQQVSIEAIQEVEMLPRPPKVTKEEHFQLHHQMHYSQQITVSLAQGYERTSSPKPRFKSYAYTQAAYVTTSDPTRSPFPSQHLEAPEDKSFGSSLMESEVNLDRYQTALEEVLSWLLSAEDTLQAQGEISNDVEVVKDQFHTHEGYMMDLTAHQGRVGNILQLGSKLIGTGKLSEDEETEVQEQMNLLNSRWECLRVASMEKQSNLHRVLMDLQNQKLKELNDWLTKTEERTRKMEEEPLGPDLEDLKRQVQQHKVLQEDLEQEQVRVNSLTHMVVVVDESSGDHATAALEEQLKVLGDRWANICRWTEDRWVLLQDILLKWQRLTEEQCLFSAWLSEKEDAVNKIHTTGFKDQNEMLSSLQKLAVLKADLEKKKQSMGKLYSLKQDLLSTLKNKSVTQKTEAWLDNFARCWDNLVQKLEKSTAQISQAVTTTQPSLTQTTVMETVTTVTTREQILVKHAQEELPPPPPQKKRQITVDSEIRKRLDVDITELHSWITRSEAVLQSPEFAIFRKEGNFSDLKEKVNAIEREKAEKFRKLQDASRSAQALVEQMVNEGVNADSIKQASEQLNSRWIEFCQLLSERLNWLEYQNNIIAFYNQLQQLEQMTTTAENWLKIQPTTPSEPTAIKSQLKICKDEVNRLSGLQPQIERLKIQSIALKEKGQGPMFLDADFVAFTNHFKQVFSDVQAREKELQTIFDTLPPMRYQETMSAIRTWVQQSETKLSIPQLSVTDYEIMEQRLGELQALQSSLQEQQSGLYYLSTTVKEMSKKAPSEISRKYQSEFEEIEGRWKKLSSQLVEHCQKLEEQMNKLRKIQNHIQTLKKWMAEVDVFLKEEWPALGDSEILKKQLKQCRLLVSDIQTIQPSLNSVNEGGQKIKNEAEPEFASRLETELKELNTQWDHMCQQVYARKEALKGGLEKTVSLQKDLSEMHEWMTQAEEEYLERDFEYKTPDELQKAVEEMKRAKEEAQQKEAKVKLLTESVNSVIAQAPPVAQEALKKELETLTTNYQWLCTRLNGKCKTLEEVWACWHELLSYLEKANKWLNEVEFKLKTTENIPGGAEEISEVLDSLENLMRHSEDNPNQIRILAQTLTDGGVMDELINEELETFNSRWRELHEEAVRRQKLLEQSIQSAQETEKSLHLIQESLTFIDKQLAAYIADKVDAAQMPQEAQKIQSDLTSHEISLEEMKKHNQGKEAAQRVLSQIDVAQKKLQDVSMKFRLFQKPANFEQRLQESKMILDEVKMHLPALETKSVEQEVVQSQLNHCVNLYKSLSEVKSEVEMVIKTGRQIVQKKQTENPKELDERVTALKLHYNELGAKVTERKQQLEKCLKLSRKMRKEMNVLTEWLAATDMELTKRSAVEGMPSNLDSEVAWGKATQKEIEKQKVHLKSITEVGEALKTVLGKKETLVEDKLSLLNSNWIAVTSRAEEWLNLLLEYQKHMETFDQNVDHITKWIIQADTLLDESEKKKPQQKEDVLKRLKAELNDIRPKVDSTRDQAANLMANRGDHCRKLVEPQISELNHRFAAISHRIKTGKASIPLKELEQFNSDIQKLLEPLEAEIQQGVNLKEEDFNKDMNEDNEGTVKELLQRGDNLQQRITDERKREEIKIKQQLLQTKHNALKDLRSQRRKKALEISHQWYQYKRQADDLLKCLDDIEKKLASLPEPRDERKIKEIDRELQKKKEELNAVRRQAEGLSEDGAAMAVEPTQIQLSKRWREIESKFAQFRRLNFAQIHTVREETMMVMTEDMPLEISYVPSTYLTEITHVSQALLEVEQLLNAPDLCAKDFEDLFKQEESLKNIKDSLQQSSGRIDIIHSKKTAALQSATPVERVKLQEALSQLDFQWEKVNKMYKDRQGRFDRSVEKWRRFHYDIKIFNQWLTEAEQFLRKTQIPENWEHAKYKWYLKELQDGIGQRQTVVRTLNATGEEIIQQSSKTDASILQEKLGSLNLRWQEVCKQLSDRKKRLEEQKNILSEFQRDLNEFVLWLEEADNIASIPLEPGKEQQLKEKLEQVKLLVEELPLRQGILKQLNETGGPVLVSAPISPEEQDKLENKLKQTNLQWIKVSRALPEKQGEIEAQIKDLGQLEKKLEDLEEQLNHLLLWLSPIRNQLEIYNQPNQEGPFDVQETEIAVQAKQPDVEEILSKGQHLYKEKPATQPVKRKLEDLSSEWKAVNRLLQELRAKQPDLAPGLTTIGASPTQTVTLVTQPVVTKETAISKLEMPSSLMLEVPALADFNRAWTELTDWLSLLDQVIKSQRVMVGDLEDINEMIIKQKATMQDLEQRRPQLEELITAAQNLKNKTSNQEARTIITDRIERIQNQWDEVQEHLQNRRQQLNEMLKDSTQWLEAKEEAEQVLGQARAKLESWKEGPYTVDAIQKKITETKQLAKDLRQWQTNVDVANDLALKLLRDYSADDTRKVHMITENINASWRSIHKRVSEREAALEETHRLLQQFPLDLEKFLAWLTEAETTANVLQDATRKERLLEDSKGVKELMKQWQDLQGEIEAHTDVYHNLDENSQKILRSLEGSDDAVLLQRRLDNMNFKWSELRKKSLNIRSHLEASSDQWKRLHLSLQELLVWLQLKDDELSRQAPIGGDFPAVQKQNDVHRAFKRELKTKEPVIMSTLETVRIFLTEQPLEGLEKLYQEPRELPPEERAQNVTRLLRKQAEEVNTEWEKLNLHSADWQRKIDETLERLQELQEATDELDLKLRQAEVIKGSWQPVGDLLIDSLQDHLEKVKALRGEIAPLKENVSHVNDLARQLTTLGIQLSPYNLSTLEDLNTRWKLLQVAVEDRVRQLHEAHRDFGPASQHFLSTSVQGPWERAISPNKVPYYINHETQTTCWDHPKMTELYQSLADLNNVRFSAYRTAMKLRRLQKALCLDLLSLSAACDALDQHNLKQNDQPMDILQIINCLTTIYDRLEQEHNNLVNVPLCVDMCLNWLLNVYDTGRTGRIRVLSFKTGIISLCKAHLEDKYRYLFKQVASSTGFCDQRRLGLLLHDSIQIPRQLGEVASFGGSNIEPSVRSCFQFANNKPEIEAALFLDWMRLEPQSMVWLPVLHRVAAAETAKHQAKCNICKECPIIGFRYRSLKHFNYDICQSCFFSGRVAKGHKMHYPMVEYCTPTTSGEDVRDFAKVLKNKFRTKRYFAKHPRMGYLPVQTVLEGDNMETPVTLINFWPVDSAPASSPQLSHDDTHSRIEHYASRLAEMENSNGSYLNDSISPNESIDDEHLLIQHYCQSLNQDSPLSQPRSPAQILISLESEERGELERILADLEEENRNLQAEYDRLKQQHEHKGLSPLPSPPEMMPTSPQSPRDAELIAEAKLLRQHKGRLEARMQILEDHNKQLESQLHRLRQLLEQPQAEAKVNGTTVSSPSTSLQRSDSSQPMLLRVVGSQTSDSMGEEDLLSPPQDTSTGLEEVMEQLNNSFPSSRGRNTPGKPMREDTM

SEQ ID NO: 8 - DNA, 13993 bp, Homo sapiens
tcctggcatcagttactgtgttgactcactcagtgttgggatcactcactttccccctacaggactcagatctgggaggcaattaccttcggagaaaaacgaataggaaaaactgaagtgttactttttttaaagctgctgaagtttgttggtttctcattgtttttaagcctactggagcaataaagtttgaagaacttttaccaggttttttttatcgctgccttgatatacacttttcaaaatgctttggtgggaagaagtagaggactgttatgaaagagaagatgttcaaaagaaaacattcacaaaatgggtaaatgcacaattttctaagtttgggaagcagcatattgagaacctcttcagtgacctacaggatgggaggcgcctcctagacctcctcgaaggcctgacagggcaaaaactgccaaaagaaaaaggatccacaagagttcatgccctgaacaatgtcaacaaggcactgcgggttttgcagaacaataatgttgatttagtgaatattggaagtactgacatcgtagatggaaatcataaactgactcttggtttgatttggaatataatcctccactggcaggtcaaaaatgtaatgaaaaatatcatggctggattgcaacaaaccaacagtgaaaagattctcctgagctgggtccgacaatcaactcgtaattatccacaggttaatgtaatcaacttcaccaccagctggtctgatggcctggctttgaatgctctcatccatagtcataggccagacctatttgactggaatagtgtggtttgccagcagtcagccacacaacgactggaacatgcattcaacatcgccagatatcaattaggcatagagaaactactcgatcctgaagatgttgataccacctatccagataagaagtccatcttaatgtacatcacatcactcttccaagttttgcctcaacaagtgagcattgaagccatccaggaagtggaaatgttgccaaggccacctaaagtgactaaagaagaacattttcagttacatcatcaaatgcactattctcaacagatcacggtcagtctagcacagggatatgagagaacttcttcccctaagcctcgattcaagagctatgcctacacacaggctgcttatgtcaccacctctgaccctacacggagcccatttccttcacagcatttggaagctcctgaagacaagtcatttggcagttcattgatggagagtgaagtaaacctggaccgttatcaaacagctttagaagaagtattatcgtggcttctttctgctgaggacacattgcaagcacaaggagagatttctaatgatgtggaagtggtgaaagaccagtttcatactcatgaggggtacatgatggatttgacagcccatcagggccgggttggtaatattctacaattgggaagtaagctgattggaacaggaaaattatcagaagatgaagaaactgaagtacaagagcagatgaatctcctaaattcaagatgggaatgcctcagggtagctagcatggaaaaacaaagcaatttacatagagttttaatggatctccagaatcagaaactgaaagagttgaatgactggctaacaaaaacagaagaaagaacaaggaaaatggaggaagagcctcttggacctgatcttgaagacctaaaacgccaagtacaacaacataaggtgcttcaagaagatctagaacaagaacaagtcagggtcaattctctcactcacatggtggtggtagttgatgaatctagtggagatcacgcaactgctgctttggaagaacaacttaaggtattgggagatcgatgggcaaacatctgtagatggacagaagaccgctgggttcttttacaagacatccttctcaaatggcaacgtcttactgaagaacagtgcctttttagtgcatggctttcagaaaaagaagatgcagtgaacaagattcacacaactggctttaaagatcaaaatgaaatgttatcaagtcttcaaaaactggccgttttaaaagcggatctagaaaagaaaaagcaatccatgggcaaactgtattcactcaaacaagatcttctttcaacactgaagaataagtcagtgacccagaagacggaagcatggctggataactttgcccggtgttgggataatttagtccaaaaacttgaaaagagtacagcacagatttcacaggctgtcaccaccactcagccatcactaacacagacaactgtaatggaaacagtaactacggtgaccacaagggaacagatcctggtaaagcatgctcaagaggaacttccaccaccacctccccaaaagaagaggcagattactgtggattctgaaattaggaaaaggttggatgttgatataactgaacttcacagctggattactcgctcagaagctgtgttgcagagtcctgaatttgcaatctttcggaaggaaggcaacttctcagacttaaaagaaaaagtcaatgccatagagcgagaaaaagctgagaagttcagaaaactgcaagatgccagcagatcagctcaggccctggtggaacagatggtgaatgagggtgttaatgcagatagcatcaaacaagcctcagaacaactgaacagccggtggatcgaattctgccagttgctaagtgagagacttaactggctggagtatcagaacaacatcatcgctttctataatcagctacaacaattggagcagatgacaactactgctgaaaactggttgaaaatccaacccaccaccccatcagagccaacagcaattaaaagtcagttaaaaatttgtaaggatgaagtcaaccggctatcaggtcttcaacctcaaattgaacgattaaaaattcaaagcatagccctgaaagagaaaggacaaggacccatgttcctggatgcagactttgtggcctttacaaatcattttaagcaagtcttttctgatgtgcaggccagagagaaagagctacagacaatttttgacactttgccaccaatgcgctatcaggagaccatgagtgccatcaggacatgggtccagcagtcagaaaccaaactctccatacctcaacttagtgtcaccgactatgaaatcatggagcagagactcggggaattgcaggctttacaaagttctctgcaagagcaacaaagtggcctatactatctcagcaccactgtgaaagagatgtcgaagaaagcgccctctgaaattagccggaaatatcaatcagaatttgaagaaattgagggacgctggaagaagctctcctcccagctggttgagcattgtcaaaagctagaggagcaaatgaataaactccgaaaaattcagaatcacatacaaaccctgaagaaatggatggctgaagttgatgtttttctgaaggaggaatggcctgcccttggggattcagaaattctaaaaaagcagctgaaacagtgcagacttttagtcagtgatattcagacaattcagcccagtctaaacagtgtcaatgaaggtgggcagaagataaagaatgaagcagagccagagtttgcttcgagacttgagacagaactcaaagaacttaacactcagtgggatcacatgtgccaacaggtctatgccagaaaggaggccttgaagggaggtttggagaaaactgtaagcctccagaaagatctatcagagatgcacgaatggatgacacaagctgaagaagagtatcttgagagagattttgaatataaaactccagatgaattacagaaagcagttgaagagatgaagagagctaaagaagaggcccaacaaaaagaagcgaaagtgaaactccttactgagtctgtaaatagtgtcatagctcaagctccacctgtagcacaagaggccttaaaaaaggaacttgaaactctaaccaccaactaccagtggctctgcactaggctgaatgggaaatgcaagactttggaagaagtttgggcatgttggcatgagttattgtcatacttggagaaagcaaacaagtggctaaatgaagtagaatttaaacttaaaaccactgaaaacattcctggcggagctgaggaaatctctgaggtgctagattcacttgaaaatttgatgcgacattcagaggataacccaaatcagattcgcatattggcacagaccctaacagatggcggagtcatggatgagctaatcaatgaggaacttgagacatttaattctcgttggagggaactacatgaagaggctgtaaggaggcaaaagttgcttgaacagagcatccagtctgcccaggagactgaaaaatccttacacttaatccaggagtccctcacattcattgacaagcagttggcagcttatattgcagacaaggtggacgcagctcaaatgcctcaggaagcccagaaaatccaatctgatttgacaagtcatgagatcagtttagaagaaatgaagaaacataatcaggggaaggaggctgcccaaagagtcctgtctcagattgatgttgcacagaaaaaattacaagatgtctccatgaagtttcgattattccagaaaccagccaattttgagcagcgtctacaagaaagtaagatgattttagatgaagtgaagatgcacttgcctgcattggaaacaaagagtgtggaacaggaagtagtacagtcacagctaaatcattgtgtgaacttgtataaaagtctgagtgaagtgaagtctgaagtggaaatggtgataaagactggacgtcagattgtacagaaaaagcagacggaaaatcccaaagaacttgatgaaagagtaacagctttgaaattgcattataatgagctgggagcaaaggtaacagaaagaaagcaacagttggagaaatgcttgaaattgtcccgtaagatgcgaaaggaaatgaatgtcttgacagaatggctggcagctacagatatggaattgacaaagagatcagcagttgaaggaatgcctagtaatttggattctgaagttgcctggggaaaggctactcaaaaagagattgagaaacagaaggtgcacctgaagagtatcacagaggtaggagaggccttgaaaacagttttgggcaagaaggagacgttggtggaagataaactcagtcttctgaatagtaactggatagctgtcacctcccgagcagaagagtggttaaatcttttgttggaataccagaaacacatggaaacttttgaccagaatgtggaccacatcacaaagtggatcattcaggctgacacacttttggatgaatcagagaaaaagaaaccccagcaaaaagaagacgtgcttaagcgtttaaaggcagaactgaatgacatacgcccaaaggtggactctacacgtgaccaagcagcaaacttgatggcaaaccgcggtgaccactgcaggaaattagtagagccccaaatctcagagctcaaccatcgatttgcagccatttcacacagaattaagactggaaaggcctccattcctttgaaggaattggagcagtttaactcagatatacaaaaattgcttgaaccactggaggctgaaattcagcagggggtgaatctgaaagaggaagacttcaataaagatatgaatgaagacaatgagggtactgtaaaagaattgttgcaaagaggagacaacttacaacaaagaatcacagatgagagaaagcgagaggaaataaagataaaacagcagctgttacagacaaaacataatgctctcaaggatttgaggtctcaaagaagaaaaaaggctctagaaatttctcatcagtggtatcagtacaagaggcaggctgatgatctcctgaaatgcttggatgacattgaaaaaaaattagccagcctacctgagcccagagatgaaaggaaaataaaggaaattgatcgggaattgcagaagaagaaagaggagctgaatgcagtgcgtaggcaagctgagggcttgtctgaggatggggccgcaatggcagtggagccaactcagatccagctcagcaagcgctggcgggaaattgagagcaaatttgctcagtttcgaagactcaactttgcacaaattcacactgtccgtgaagaaacgatgatggtgatgactgaagacatgcctttggaaatttcttatgtgccttctacttatttgactgaaatcactcatgtctcacaagccctattagaagtggaacaacttctcaatgctcctgacctctgtgctaaggactttgaagatctctttaagcaagaggagtctctgaagaatataaaagatagtctacaacaaagctcaggtcggattgacattattcatagcaagaagacagcagcattgcaaagtgcaacgcctgtggaaagggtgaagctacaggaagctctctcccagcttgatttccaatgggaaaaagttaacaaaatgtacaaggaccgacaagggcgatttgacagatctgttgagaaatggcggcgttttcattatgatataaagatatttaatcagtggctaacagaagctgaacagtttctcagaaagacacaaattcctgagaattgggaacatgctaaatacaaatggtatcttaaggaactccaggatggcattgggcagcggcaaactgttgtcagaacattgaatgcaactggggaagaaataattcagcaatcctcaaaaacagatgccagtattctacaggaaaaattgggaagcctgaatctgcggtggcaggaggtctgcaaacagctgtcagacagaaaaaagaggctagaagaacaaaagaatatcttgtcagaatttcaaagagatttaaatgaatttgttttatggttggaggaagcagataacattgctagtatcccacttgaacctggaaaagagcagcaactaaaagaaaagcttgagcaagtcaagttactggtggaagagttgcccctgcgccagggaattctcaaacaattaaatgaaactggaggacccgtgcttgtaagtgctcccataagcccagaagagcaagataaacttgaaaataagctcaagcagacaaatctccagtggataaaggtttccagagctttacctgagaaacaaggagaaattgaagctcaaataaaagaccttgggcagcttgaaaaaaagcttgaagaccttgaagagcagttaaatcatctgctgctgtggttatctcctattaggaatcagttggaaatttataaccaaccaaaccaagaaggaccatttgacgttcaggaaactgaaatagcagttcaagctaaacaaccggatgtggaagagattttgtctaaagggcagcatttgtacaaggaaaaaccagccactcagccagtgaagaggaagttagaagatctgagctctgagtggaaggcggtaaaccgtttacttcaagagctgagggcaaagcagcctgacctagctcctggactgaccactattggagcctctcctactcagactgttactctggtgacacaacctgtggttactaaggaaactgccatctccaaactagaaatgccatcttccttgatgttggaggtacctgctctggcagatttcaaccgggcttggacagaacttaccgactggctttctctgcttgatcaagttataaaatcacagagggtgatggtgggtgaccttgaggatatcaacgagatgatcatcaagcagaaggcaacaatgcaggatttggaacagaggcgtccccagttggaagaactcattaccgctgcccaaaatttgaaaaacaagaccagcaatcaagaggctagaacaatcattacggatcgaattgaaagaattcagaatcagtgggatgaagtacaagaacaccttcagaaccggaggcaacagttgaatgaaatgttaaaggattcaacacaatggctggaagctaaggaagaagctgagcaggtcttaggacaggccagagccaagcttgagtcatggaaggagggtccctatacagtagatgcaatccaaaagaaaatcacagaaaccaagcagttggccaaagacctccgccagtggcagacaaatgtagatgtggcaaatgacttggccctgaaacttctccgggattattctgcagatgataccagaaaagtccacatgataacagagaatatcaatgcctcttggagaagcattcataaaagggtgagtgagcgagaggctgctttggaagaaactcatagattactgcaacagttccccctggacctggaaaagtttcttgcctggcttacagaagctgaaacaactgccaatgtcctacaggatgctacccgtaaggaaaggctcctagaagactccaagggagtaaaagagctgatgaaacaatggcaagacctccaaggtgaaattgaagctcacacagatgtttatcacaacctggatgaaaacagccaaaaaatcctgagatccctggaaggttccgatgatgcagtcctgttacaaagacgtttggataacatgaacttcaagtggagtgaacttcggaaaaagtctctcaacattaggtcccatttggaagccagttctgaccagtggaagcgtctgcacctttctctgcaggaacttctggtgtggctacagctgaaagatgatgaattaagccggcaggcacctattggaggcgactttccagcagttcagaagcagaacgatgtacatagggccttcaagagggaattgaaaactaaagaacctgtaatcatgagtactcttgagactgtacgaatatttctgacagagcagcctttggaaggactagagaaactctaccaggagcccagagagctgcctcctgaggagagagcccagaatgtcactcggcttctacgaaagcaggctgaggaggtcaatactgagtgggaaaaattgaacctgcactccgctgactggcagagaaaaatagatgagacccttgaaagactccaggaacttcaagaggccacggatgagctggacctcaagctgcgccaagctgaggtgatcaagggatcctggcagcccgtgggcgatctcctcattgactctctccaagatcacctcgagaaagtcaaggcacttcgaggagaaattgcgcctctgaaagagaacgtgagccacgtcaatgaccttgctcgccagcttaccactttgggcattcagctctcaccgtataacctcagcactctggaagacctgaacaccagatggaagcttctgcaggtggccgtcgaggaccgagtcaggcagctgcatgaagcccacagggactttggtccagcatctcagcactttctttccacgtctgtccagggtccctgggagagagccatctcgccaaacaaagtgccctactatatcaaccacgagactcaaacaacttgctgggaccatcccaaaatgacagagctctaccagtctttagctgacctgaataatgtcagattctcagcttataggactgccatgaaactccgaagactgcagaaggccctttgcttggatctcttgagcctgtcagctgcatgtgatgccttggaccagcacaacctcaagcaaaatgaccagcccatggatatcctgcagattattaattgtttgaccactatttatgaccgcctggagcaagagcacaacaatttggtcaacgtccctctctgcgtggatatgtgtctgaactggctgctgaatgtttatgatacgggacgaacagggaggatccgtgtcctgtcttttaaaactggcatcatttccctgtgtaaagcacatttggaagacaagtacagataccttttcaagcaagtggcaagttcaacaggattttgtgaccagcgcaggctgggcctccttctgcatgattctatccaaattccaagacagttgggtgaagttgcatcctttgggggcagtaacattgagccaagtgtccggagctgcttccaatttgctaataataagccagagatcgaagcggccctcttcctagactggatgagactggaaccccagtccatggtgtggctgcccgtcctgcacagagtggctgctgcagaaactgccaagcatcaggccaaatgtaacatctgcaaagagtgtccaatcattggattcaggtacaggagtctaaagcactttaattatgacatctgccaaagctgctttttttctggtcgagttgcaaaaggccataaaatgcactatcccatggtggaatattgcactccgactacatcaggagaagatgttcgagactttgccaaggtactaaaaaacaaatttcgaaccaaaaggtattttgcgaagcatccccgaatgggctacctgccagtgcagactgtcttagagggggacaacatggaaactcccgttactctgatcaacttctggccagtagattctgcgcctgcctcgtcccctcagctttcacacgatgatactcattcacgcattgaacattatgctagcaggctagcagaaatggaaaacagcaatggatcttatctaaatgatagcatctctcctaatgagagcatagatgatgaacatttgttaatccagcattactgccaaagtttgaaccaggactcccccctgagccagcctcgtagtcctgcccagatcttgatttccttagagagtgaggaaagaggggagctagagagaatcctagcagatcttgaggaagaaaacaggaatctgcaagcagaatatgaccgtctaaagcagcagcacgaacataaaggcctgtccccactgccgtcccctcctgaaatgatgcccacctctccccagagtccccgggatgctgagctcattgctgaggccaagctactgcgtcaacacaaaggccgcctggaagccaggatgcaaatcctggaagaccacaataaacagctggagtcacagttacacaggctaaggcagctgctggagcaaccccaggcagaggccaaagtgaatggcacaacggtgtcctctccttctacctctctacagaggtccgacagcagtcagcctatgctgctccgagtggttggcagtcaaacttcggactccatgggtgaggaagatcttctcagtcctccccaggacacaagcacagggttagaggaggtgatggagcaactcaacaactccttccctagttcaagaggaagaaatacccctggaaagccaatgagagaggacacaatgtaggaagtcttttccacatggcagatgatttgggcagagcgatggagtccttagtatcagtcatgacagatgaagaaggagcagaataaatgttttacaactcctgattcccgcatggtttttataatattcatacaacaaagaggattagacagtaagagtttacaagaaataaatctatatttttgtgaagggtagtggtattatactgtagatttcagtagtttctaagtctgttattgttttgttaacaatggcaggttttacacgtctatgcaattgtacaaaaaagttataagaaaactacatgtaaaatcttgatagctaaataacttgccatttctttatatggaacgcattttgggttgtttaaaaatttataacagttataaagaaagattgtaaactaaagtgtgctttataaaaaaaagttgtttataaaaacccctaaaaacaaaacaaacacacacacacacacatacacacacacacacaaaactttgaggcagcgcattgttttgcatccttttggcgtgatatccatatgaaattcatggctttttctttttttgcatattaaagataagacttcctctaccaccacaccaaatgactactacacactgctcatttgagaactgtcagctgagtggggcaggcttgagttttcatttcatatatctatatgtctataagtatataaatactatagttatatagataaagagatacgaatttctatagactgactttttccattttttaaatgttcatgtcacatcctaatagaaagaaattacttctagtcagtcatccaggcttacctgcttggtctagaatggatttttcccggagccggaagccaggaggaaactacaccacactaaaacattgtctacagctccagatgtttctcattttaaacaactttccactgacaacgaaagtaaagtaaagtattggatttttttaaagggaacatgtgaatgaatacacaggacttattatatcagagtgagtaatcggttggttggttgattgattgattgattgatacattcagcttcctgctgctagcaatgccacgatttagatttaatgatgcttcagtggaaatcaatcagaaggtattctgaccttgtgaacatcagaaggtattttttaactcccaagcagtagcaggacgatgatagggctggagggctatggattcccagcccatccctgtgaaggagtaggccactctttaagtgaaggattggatgattgttcataatacataaagttctctgtaattacaactaaattattatgccctcttctcacagtcaaaaggaactgggtggtttggtttttgttgcttttttagatttattgtcccatgtgggatgagtttttaaatgccacaagacataatttaaaataaataaactttgggaaaaggtgtaaaacagtagccccatcacatttgtgatactgacaggtatcaacccagaagcccatgaactgtgtttccatcctttgcatttctctgcgagtagttccacacaggtttgtaagtaagtaagaaagaaggcaaattgattcaaatgttacaaaaaaacccttcttggtggattagacaggttaaatatataaacaaacaaacaaaaattgctcaaaaaagaggagaaaagctcaagaggaaaagctaaggactggtaggaaaaagctttactctttcatgccattttatttctttttgatttttaaatcattcattcaatagataccaccgtgtgacctataattttgcaaatctgttacctctgacatcaagtgtaattagcttttggagagtgggctgacatcaagtgtaattagcttttggagagtgggttttgtccattattaataattaattaattaacatcaaacacggcttctcatgctatttctacctcactttggttttggggtgttcctgataattgtgcacacctgagttcacagcttcaccacttgtccattgcgttattttctttttcctttataattctttctttttccttcataattttcaaaagaaaacccaaagctctaaggtaacaaattaccaaattacatgaagatttggtttttgtcttgcatttttttcctttatgtgacgctggaccttttctttacccaaggatttttaaaactcagatttaaaacaaggggttactttacatcctactaagaagtttaagtaagtaagtttcattctaaaatcagaggtaaatagagtgcataaataattttgttttaatctttttgtttttcttttagacacattagctctggagtgagtctgtcataatatttgaacaaaaattgagagctttattgctgcattttaagcataattaatttggacattatttcgtgttgtgttctttataaccaccaagtattaaactgtaaatcataatgtaactgaagcataaacatcacatggcatgttttgtcattgttttcaggtactgagttcttacttgagtatcataatatattgtgttttaacaccaacactgtaacatttacgaattatttttttaaacttcagttttactgcattttcacaacatatcagacttcaccaaatatatgccttactattgtattatagtactgctttactgtgtatctcaataaagcacgcagttatgttac

SEQ ID NO: 9 - protein, 3685 aa, Homo sapiens
MLWWEEVEDCYEREDVQKKTFTKWVNAQFSKFGKQHIENLFSDLQDGRRLLDLLEGLTGQKLPKEKGSTRVHALNNVNKALRVLQNNNVDLVNIGSTDIVDGNHKLTLGLIWNIILHWQVKNVMKNIMAGLQQTNSEKILLSWVRQSTRNYPQVNVINFTTSWSDGLALNALIHSHRPDLFDWNSVVCQQSATQRLEHAFNIARYQLGIEKLLDPEDVDTTYPDKKSILMYITSLFQVLPQQVSIEAIQEVEMLPRPPKVTKEEHFQLHHQMHYSQQITVSLAQGYERTSSPKPRFKSYAYTQAAYVTTSDPTRSPFPSQHLEAPEDKSFGSSLMESEVNLDRYQTALEEVLSWLLSAEDTLQAQGEISNDVEVVKDQFHTHEGYMMDLTAHQGRVGNILQLGSKLIGTGKLSEDEETEVQEQMNLLNSRWECLRVASMEKQSNLHRVLMDLQNQKLKELNDWLTKTEERTRKMEEEPLGPDLEDLKRQVQQHKVLQEDLEQEQVRVNSLTHMVVVVDESSGDHATAALEEQLKVLGDRWANICRWTEDRWVLLQDILLKWQRLTEEQCLFSAWLSEKEDAVNKIHTTGFKDQNEMLSSLQKLAVLKADLEKKKQSMGKLYSLKQDLLSTLKNKSVTQKTEAWLDNFARCWDNLVQKLEKSTAQISQAVTTTQPSLTQTTVMETVTTVTTREQILVKHAQEELPPPPPQKKRQITVDSEIRKRLDVDITELHSWITRSEAVLQSPEFAIFRKEGNFSDLKEKVNAIEREKAEKFRKLQDASRSAQALVEQMVNEGVNADSIKQASEQLNSRWIEFCQLLSERLNWLEYQNNIIAFYNQLQQLEQMTTTAENWLKIQPTTPSEPTAIKSQLKICKDEVNRLSGLQPQIERLKIQSIALKEKGQGPMFLDADFVAFTNHFKQVFSDVQAREKELQTIFDTLPPMRYQETMSAIRTWVQQSETKLSIPQLSVTDYEIMEQRLGELQALQSSLQEQQSGLYYLSTTVKEMSKKAPSEISRKYQSEFEEIEGRWKKLSSQLVEHCQKLEEQMNKLRKIQNHIQTLKKWMAEVDVFLKEEWPALGDSEILKKQLKQCRLLVSDIQTIQPSLNSVNEGGQKIKNEAEPEFASRLETELKELNTQWDHMCQQVYARKEALKGGLEKTVSLQKDLSEMHEWMTQAEEEYLERDFEYKTPDELQKAVEEMKRAKEEAQQKEAKVKLLTESVNSVIAQAPPVAQEALKKELETLTTNYQWLCTRLNGKCKTLEEVWACWHELLSYLEKANKWLNEVEFKLKTTENIPGGAEEISEVLDSLENLMRHSEDNPNQIRILAQTLTDGGVMDELINEELETFNSRWRELHEEAVRRQKLLEQSIQSAQETEKSLHLIQESLTFIDKQLAAYIADKVDAAQMPQEAQKIQSDLTSHEISLEEMKKHNQGKEAAQRVLSQIDVAQKKLQDVSMKFRLFQKPANFEQRLQESKMILDEVKMHLPALETKSVEQEVVQSQLNHCVNLYKSLSEVKSEVEMVIKTGRQIVQKKQTENPKELDERVTALKLHYNELGAKVTERKQQLEKCLKLSRKMRKEMNVLTEWLAATDMELTKRSAVEGMPSNLDSEVAWGKATQKEIEKQKVHLKSITEVGEALKTVLGKKETLVEDKLSLLNSNWIAVTSRAEEWLNLLLEYQKHMETFDQNVDHITKWIIQADTLLDESEKKKPQQKEDVLKRLKAELNDIRPKVDSTRDQAANLMANRGDHCRKLVEPQISELNHRFAAISHRIKTGKASIPLKELEQFNSDIQKLLEPLEAEIQQGVNLKEEDFNKDMNEDNEGTVKELLQRGDNLQQRITDERKREEIKIKQQLLQTKHNALKDLRSQRRKKALEISHQWYQYKRQADDLLKCLDDIEKKLASLPEPRDERKIKEIDRELQKKKEELNAVRRQAEGLSEDGAAMAVEPTQIQLSKRWREIESKFAQFRRLNFAQIHTVREETMMVMTEDMPLEISYVPSTYLTEITHVSQALLEVEQLLNAPDLCAKDFEDLFKQEESLKNIKDSLQQSSGRIDIIHSKKTAALQSATPVERVKLQEALSQLDFQWEKVNKMYKDRQGRFDRSVEKWRRFHYDIKIFNQWLTEAEQFLRKTQIPENWEHAKYKWYLKELQDGIGQRQTVVRTLNATGEEIIQQSSKTDASILQEKLGSLNLRWQEVCKQLSDRKKRLEEQKNILSEFQRDLNEFVLWLEEADNIASIPLEPGKEQQLKEKLEQVKLLVEELPLRQGILKQLNETGGPVLVSAPISPEEQDKLENKLKQTNLQWIKVSRALPEKQGEIEAQIKDLGQLEKKLEDLEEQLNHLLLWLSPIRNQLEIYNQPNQEGPFDVQETEIAVQAKQPDVEEILSKGQHLYKEKPATQPVKRKLEDLSSEWKAVNRLLQELRAKQPDLAPGLTTIGASPTQTVTLVTQPVVTKETAISKLEMPSSLMLEVPALADFNRAWTELTDWLSLLDQVIKSQRVMVGDLEDINEMIIKQKATMQDLEQRRPQLEELITAAQNLKNKTSNQEARTIITDRIERIQNQWDEVQEHLQNRRQQLNEMLKDSTQWLEAKEEAEQVLGQARAKLESWKEGPYTVDAIQKKITETKQLAKDLRQWQTNVDVANDLALKLLRDYSADDTRKVHMITENINASWRSIHKRVSEREAALEETHRLLQQFPLDLEKFLAWLTEAETTANVLQDATRKERLLEDSKGVKELMKQWQDLQGEIEAHTDVYHNLDENSQKILRSLEGSDDAVLLQRRLDNMNFKWSELRKKSLNIRSHLEASSDQWKRLHLSLQELLVWLQLKDDELSRQAPIGGDFPAVQKQNDVHRAFKRELKTKEPVIMSTLETVRIFLTEQPLEGLEKLYQEPRELPPEERAQNVTRLLRKQAEEVNTEWEKLNLHSADWQRKIDETLERLQELQEATDELDLKLRQAEVIKGSWQPVGDLLIDSLQDHLEKVKALRGEIAPLKENVSHVNDLARQLTTLGIQLSPYNLSTLEDLNTRWKLLQVAVEDRVRQLHEAHRDFGPASQHFLSTSVQGPWERAISPNKVPYYINHETQTTCWDHPKMTELYQSLADLNNVRFSAYRTAMKLRRLQKALCLDLLSLSAACDALDQHNLKQNDQPMDILQIINCLTTIYDRLEQEHNNLVNVPLCVDMCLNWLLNVYDTGRTGRIRVLSFKTGIISLCKAHLEDKYRYLFKQVASSTGFCDQRRLGLLLHDSIQIPRQLGEVASFGGSNIEPSVRSCFQFANNKPEIEAALFLDWMRLEPQSMVWLPVLHRVAAAETAKHQAKCNICKECPIIGFRYRSLKHFNYDICQSCFFSGRVAKGHKMHYPMVEYCTPTTSGEDVRDFAKVLKNKFRTKRYFAKHPRMGYLPVQTVLEGDNMETPVTLINFWPVDSAPASSPQLSHDDTHSRIEHYASRLAEMENSNGSYLNDSISPNESIDDEHLLIQHYCQSLNQDSPLSQPRSPAQILISLESEERGELERILADLEEENRNLQAEYDRLKQQHEHKGLSPLPSPPEMMPTSPQSPRDAELIAEAKLLRQHKGRLEARMQILEDHNKQLESQLHRLRQLLEQPQAEAKVNGTTVSSPSTSLQRSDSSQPMLLRVVGSQTSDSMGEEDLLSPPQDTSTGLEEVMEQLNNSFPSSRGRNTPGKPMREDTM

SEQ ID NO: 10 - DNA, 14000 bp, Homo sapiens
atgctgtctgtgaagctgaatctgtgagaacacctcactattcacggcaaccggagtggaagaaacaggtgcaaaaagattgtgtgtttgtctgcttttgtgaggctggtcagagattctgtgcctgctttatctgtgcttggctatgactctacctccaggtttaccataccccatagaatgtgtaagagaaaagtaccaacagggaaatcagcaaaaagctttcctatgaaggtgtgtagccagcctccgcagaatttgaaatgtctgaggtctcatctgatgaaagagaagatgttcaaaagaaaacattcacaaaatgggtaaatgcacaattttctaagtttgggaagcagcatattgagaacctcttcagtgacctacaggatgggaggcgcctcctagacctcctcgaaggcctgacagggcaaaaactgccaaaagaaaaaggatccacaagagttcatgccctgaacaatgtcaacaaggcactgcgggttttgcagaacaataatgttgatttagtgaatattggaagtactgacatcgtagatggaaatcataaactgactcttggtttgatttggaatataatcctccactggcaggtcaaaaatgtaatgaaaaatatcatggctggattgcaacaaaccaacagtgaaaagattctcctgagctgggtccgacaatcaactcgtaattatccacaggttaatgtaatcaacttcaccaccagctggtctgatggcctggctttgaatgctctcatccatagtcataggccagacctatttgactggaatagtgtggtttgccagcagtcagccacacaacgactggaacatgcattcaacatcgccagatatcaattaggcatagagaaactactcgatcctgaagatgttgataccacctatccagataagaagtccatcttaatgtacatcacatcactcttccaagttttgcctcaacaagtgagcattgaagccatccaggaagtggaaatgttgccaaggccacctaaagtgactaaagaagaacattttcagttacatcatcaaatgcactattctcaacagatcacggtcagtctagcacagggatatgagagaacttcttcccctaagcctcgattcaagagctatgcctacacacaggctgcttatgtcaccacctctgaccctacacggagcccatttccttcacagcatttggaagctcctgaagacaagtcatttggcagttcattgatggagagtgaagtaaacctggaccgttatcaaacagctttagaagaagtattatcgtggcttctttctgctgaggacacattgcaagcacaaggagagatttctaatgatgtggaagtggtgaaagaccagtttcatactcatgaggggtacatgatggatttgacagcccatcagggccgggttggtaatattctacaattgggaagtaagctgattggaacaggaaaattatcagaagatgaagaaactgaagtacaagagcagatgaatctcctaaattcaagatgggaatgcctcagggtagctagcatggaaaaacaaagcaatttacatagagttttaatggatctccagaatcagaaactgaaagagttgaatgactggctaacaaaaacagaagaaagaacaaggaaaatggaggaagagcctcttggacctgatcttgaagacctaaaacgccaagtacaacaacataaggtgcttcaagaagatctagaacaagaacaagtcagggtcaattctctcactcacatggtggtggtagttgatgaatctagtggagatcacgcaactgctgctttggaagaacaacttaaggtattgggagatcgatgggcaaacatctgtagatggacagaagaccgctgggttcttttacaagacatccttctcaaatggcaacgtcttactgaagaacagtgcctttttagtgcatggctttcagaaaaagaagatgcagtgaacaagattcacacaactggctttaaagatcaaaatgaaatgttatcaagtcttcaaaaactggccgttttaaaagcggatctagaaaagaaaaagcaatccatgggcaaactgtattcactcaaacaagatcttctttcaacactgaagaataagtcagtgacccagaagacggaagcatggctggataactttgcccggtgttgggataatttagtccaaaaacttgaaaagagtacagcacagatttcacaggctgtcaccaccactcagccatcactaacacagacaactgtaatggaaacagtaactacggtgaccacaagggaacagatcctggtaaagcatgctcaagaggaacttccaccaccacctccccaaaagaagaggcagattactgtggattctgaaattaggaaaaggttggatgttgatataactgaacttcacagctggattactcgctcagaagctgtgttgcagagtcctgaatttgcaatctttcggaaggaaggcaacttctcagacttaaaagaaaaagtcaatgccatagagcgagaaaaagctgagaagttcagaaaactgcaagatgccagcagatcagctcaggccctggtggaacagatggtgaatgagggtgttaatgcagatagcatcaaacaagcctcagaacaactgaacagccggtggatcgaattctgccagttgctaagtgagagacttaactggctggagtatcagaacaacatcatcgctttctataatcagctacaacaattggagcagatgacaactactgctgaaaactggttgaaaatccaacccaccaccccatcagagccaacagcaattaaaagtcagttaaaaatttgtaaggatgaagtcaaccggctatcaggtcttcaacctcaaattgaacgattaaaaattcaaagcatagccctgaaagagaaaggacaaggacccatgttcctggatgcagactttgtggcctttacaaatcattttaagcaagtcttttctgatgtgcaggccagagagaaagagctacagacaatttttgacactttgccaccaatgcgctatcaggagaccatgagtgccatcaggacatgggtccagcagtcagaaaccaaactctccatacctcaacttagtgtcaccgactatgaaatcatggagcagagactcggggaattgcaggctttacaaagttctctgcaagagcaacaaagtggcctatactatctcagcaccactgtgaaagagatgtcgaagaaagcgccctctgaaattagccggaaatatcaatcagaatttgaagaaattgagggacgctggaagaagctctcctcccagctggttgagcattgtcaaaagctagaggagcaaatgaataaactccgaaaaattcagaatcacatacaaaccctgaagaaatggatggctgaagttgatgtttttctgaaggaggaatggcctgcccttggggattcagaaattctaaaaaagcagctgaaacagtgcagacttttagtcagtgatattcagacaattcagcccagtctaaacagtgtcaatgaaggtgggcagaagataaagaatgaagcagagccagagtttgcttcgagacttgagacagaactcaaagaacttaacactcagtgggatcacatgtgccaacaggtctatgccagaaaggaggccttgaagggaggtttggagaaaactgtaagcctccagaaagatctatcagagatgcacgaatggatgacacaagctgaagaagagtatcttgagagagattttgaatataaaactccagatgaattacagaaagcagttgaagagatgaagagagctaaagaagaggcccaacaaaaagaagcgaaagtgaaactccttactgagtctgtaaatagtgtcatagctcaagctccacctgtagcacaagaggccttaaaaaaggaacttgaaactctaaccaccaactaccagtggctctgcactaggctgaatgggaaatgcaagactttggaagaagtttgggcatgttggcatgagttattgtcatacttggagaaagcaaacaagtggctaaatgaagtagaatttaaacttaaaaccactgaaaacattcctggcggagctgaggaaatctctgaggtgctagattcacttgaaaatttgatgcgacattcagaggataacccaaatcagattcgcatattggcacagaccctaacagatggcggagtcatggatgagctaatcaatgaggaacttgagacatttaattctcgttggagggaactacatgaagaggctgtaaggaggcaaaagttgcttgaacagagcatccagtctgcccaggagactgaaaaatccttacacttaatccaggagtccctcacattcattgacaagcagttggcagcttatattgcagacaaggtggacgcagctcaaatgcctcaggaagcccagaaaatccaatctgatttgacaagtcatgagatcagtttagaagaaatgaagaaacataatcaggggaaggaggctgcccaaagagtcctgtctcagattgatgttgcacagaaaaaattacaagatgtctccatgaagtttcgattattccagaaaccagccaattttgagcagcgtctacaagaaagtaagatgattttagatgaagtgaagatgcacttgcctgcattggaaacaaagagtgtggaacaggaagtagtacagtcacagctaaatcattgtgtgaacttgtataaaagtctgagtgaagtgaagtctgaagtggaaatggtgataaagactggacgtcagattgtacagaaaaagcagacggaaaatcccaaagaacttgatgaaagagtaacagctttgaaattgcattataatgagctgggagcaaaggtaacagaaagaaagcaacagttggagaaatgcttgaaattgtcccgtaagatgcgaaaggaaatgaatgtcttgacagaatggctggcagctacagatatggaattgacaaagagatcagcagttgaaggaatgcctagtaatttggattctgaagttgcctggggaaaggctactcaaaaagagattgagaaacagaaggtgcacctgaagagtatcacagaggtaggagaggccttgaaaacagttttgggcaagaaggagacgttggtggaagataaactcagtcttctgaatagtaactggatagctgtcacctcccgagcagaagagtggttaaatcttttgttggaataccagaaacacatggaaacttttgaccagaatgtggaccacatcacaaagtggatcattcaggctgacacacttttggatgaatcagagaaaaagaaaccccagcaaaaagaagacgtgcttaagcgtttaaaggcagaactgaatgacatacgcccaaaggtggactctacacgtgaccaagcagcaaacttgatggcaaaccgcggtgaccactgcaggaaattagtagagccccaaatctcagagctcaaccatcgatttgcagccatttcacacagaattaagactggaaaggcctccattcctttgaaggaattggagcagtttaactcagatatacaaaaattgcttgaaccactggaggctgaaattcagcagggggtgaatctgaaagaggaagacttcaataaagatatgaatgaagacaatgagggtactgtaaaagaattgttgcaaagaggagacaacttacaacaaagaatcacagatgagagaaagcgagaggaaataaagataaaacagcagctgttacagacaaaacataatgctctcaaggatttgaggtctcaaagaagaaaaaaggctctagaaatttctcatcagtggtatcagtacaagaggcaggctgatgatctcctgaaatgcttggatgacattgaaaaaaaattagccagcctacctgagcccagagatgaaaggaaaataaaggaaattgatcgggaattgcagaagaagaaagaggagctgaatgcagtgcgtaggcaagctgagggcttgtctgaggatggggccgcaatggcagtggagccaactcagatccagctcagcaagcgctggcgggaaattgagagcaaatttgctcagtttcgaagactcaactttgcacaaattcacactgtccgtgaagaaacgatgatggtgatgactgaagacatgcctttggaaatttcttatgtgccttctacttatttgactgaaatcactcatgtctcacaagccctattagaagtggaacaacttctcaatgctcctgacctctgtgctaaggactttgaagatctctttaagcaagaggagtctctgaagaatataaaagatagtctacaacaaagctcaggtcggattgacattattcatagcaagaagacagcagcattgcaaagtgcaacgcctgtggaaagggtgaagctacaggaagctctctcccagcttgatttccaatgggaaaaagttaacaaaatgtacaaggaccgacaagggcgatttgacagatctgttgagaaatggcggcgttttcattatgatataaagatatttaatcagtggctaacagaagctgaacagtttctcagaaagacacaaattcctgagaattgggaacatgctaaatacaaatggtatcttaaggaactccaggatggcattgggcagcggcaaactgttgtcagaacattgaatgcaactggggaagaaataattcagcaatcctcaaaaacagatgccagtattctacaggaaaaattgggaagcctgaatctgcggtggcaggaggtctgcaaacagctgtcagacagaaaaaagaggctagaagaacaaaagaatatcttgtcagaatttcaaagagatttaaatgaatttgttttatggttggaggaagcagataacattgctagtatcccacttgaacctggaaaagagcagcaactaaaagaaaagcttgagcaagtcaagttactggtggaagagttgcccctgcgccagggaattctcaaacaattaaatgaaactggaggacccgtgcttgtaagtgctcccataagcccagaagagcaagataaacttgaaaataagctcaagcagacaaatctccagtggataaaggtttccagagctttacctgagaaacaaggagaaattgaagctcaaataaaagaccttgggcagcttgaaaaaaagcttgaagaccttgaagagcagttaaatcatctgctgctgtggttatctcctattaggaatcagttggaaatttataaccaaccaaaccaagaaggaccatttgacgttcaggaaactgaaatagcagttcaagctaaacaaccggatgtggaagagattttgtctaaagggcagcatttgtacaaggaaaaaccagccactcagccagtgaagaggaagttagaagatctgagctctgagtggaaggcggtaaaccgtttacttcaagagctgagggcaaagcagcctgacctagctcctggactgaccactattggagcctctcctactcagactgttactctggtgacacaacctgtggttactaaggaaactgccatctccaaactagaaatgccatcttccttgatgttggaggtacctgctctggcagatttcaaccgggcttggacagaacttaccgactggctttctctgcttgatcaagttataaaatcacagagggtgatggtgggtgaccttgaggatatcaacgagatgatcatcaagcagaaggcaacaatgcaggatttggaacagaggcgtccccagttggaagaactcattaccgctgcccaaaatttgaaaaacaagaccagcaatcaagaggctagaacaatcattacggatcgaattgaaagaattcagaatcagtgggatgaagtacaagaacaccttcagaaccggaggcaacagttgaatgaaatgttaaaggattcaacacaatggctggaagctaaggaagaagctgagcaggtcttaggacaggccagagccaagcttgagtcatggaaggagggtccctatacagtagatgcaatccaaaagaaaatcacagaaaccaagcagttggccaaagacctccgccagtggcagacaaatgtagatgtggcaaatgacttggccctgaaacttctccgggattattctgcagatgataccagaaaagtccacatgataacagagaatatcaatgcctcttggagaagcattcataaaagggtgagtgagcgagaggctgctttggaagaaactcatagattactgcaacagttccccctggacctggaaaagtttcttgcctggcttacagaagctgaaacaactgccaatgtcctacaggatgctacccgtaaggaaaggctcctagaagactccaagggagtaaaagagctgatgaaacaatggcaagacctccaaggtgaaattgaagctcacacagatgtttatcacaacctggatgaaaacagccaaaaaatcctgagatccctggaaggttccgatgatgcagtcctgttacaaagacgtttggataacatgaacttcaagtggagtgaacttcggaaaaagtctctcaacattaggtcccatttggaagccagttctgaccagtggaagcgtctgcacctttctctgcaggaacttctggtgtggctacagctgaaagatgatgaattaagccggcaggcacctattggaggcgactttccagcagttcagaagcagaacgatgtacatagggccttcaagagggaattgaaaactaaagaacctgtaatcatgagtactcttgagactgtacgaatatttctgacagagcagcctttggaaggactagagaaactctaccaggagcccagagagctgcctcctgaggagagagcccagaatgtcactcggcttctacgaaagcaggctgaggaggtcaatactgagtgggaaaaattgaacctgcactccgctgactggcagagaaaaatagatgagacccttgaaagactccaggaacttcaagaggccacggatgagctggacctcaagctgcgccaagctgaggtgatcaagggatcctggcagcccgtgggcgatctcctcattgactctctccaagatcacctcgagaaagtcaaggcacttcgaggagaaattgcgcctctgaaagagaacgtgagccacgtcaatgaccttgctcgccagcttaccactttgggcattcagctctcaccgtataacctcagcactctggaagacctgaacaccagatggaagcttctgcaggtggccgtcgaggaccgagtcaggcagctgcatgaagcccacagggactttggtccagcatctcagcactttctttccacgtctgtccagggtccctgggagagagccatctcgccaaacaaagtgccctactatatcaaccacgagactcaaacaacttgctgggaccatcccaaaatgacagagctctaccagtctttagctgacctgaataatgtcagattctcagcttataggactgccatgaaactccgaagactgcagaaggccctttgcttggatctcttgagcctgtcagctgcatgtgatgccttggaccagcacaacctcaagcaaaatgaccagcccatggatatcctgcagattattaattgtttgaccactatttatgaccgcctggagcaagagcacaacaatttggtcaacgtccctctctgcgtggatatgtgtctgaactggctgctgaatgtttatgatacgggacgaacagggaggatccgtgtcctgtcttttaaaactggcatcatttccctgtgtaaagcacatttggaagacaagtacagataccttttcaagcaagtggcaagttcaacaggattttgtgaccagcgcaggctgggcctccttctgcatgattctatccaaattccaagacagttgggtgaagttgcatcctttgggggcagtaacattgagccaagtgtccggagctgcttccaatttgctaataataagccagagatcgaagcggccctcttcctagactggatgagactggaaccccagtccatggtgtggctgcccgtcctgcacagagtggctgctgcagaaactgccaagcatcaggccaaatgtaacatctgcaaagagtgtccaatcattggattcaggtacaggagtctaaagcactttaattatgacatctgccaaagctgctttttttctggtcgagttgcaaaaggccataaaatgcactatcccatggtggaatattgcactccgactacatcaggagaagatgttcgagactttgccaaggtactaaaaaacaaatttcgaaccaaaaggtattttgcgaagcatccccgaatgggctacctgccagtgcagactgtcttagagggggacaacatggaaactcccgttactctgatcaacttctggccagtagattctgcgcctgcctcgtcccctcagctttcacacgatgatactcattcacgcattgaacattatgctagcaggctagcagaaatggaaaacagcaatggatcttatctaaatgatagcatctctcctaatgagagcatagatgatgaacatttgttaatccagcattactgccaaagtttgaaccaggactcccccctgagccagcctcgtagtcctgcccagatcttgatttccttagagagtgaggaaagaggggagctagagagaatcctagcagatcttgaggaagaaaacaggaatctgcaagcagaatatgaccgtctaaagcagcagcacgaacataaaggcctgtccccactgccgtcccctcctgaaatgatgcccacctctccccagagtccccgggatgctgagctcattgctgaggccaagctactgcgtcaacacaaaggccgcctggaagccaggatgcaaatcctggaagaccacaataaacagctggagtcacagttacacaggctaaggcagctgctggagcaaccccaggcagaggccaaagtgaatggcacaacggtgtcctctccttctacctctctacagaggtccgacagcagtcagcctatgctgctccgagtggttggcagtcaaacttcggactccatgggtgaggaagatcttctcagtcctccccaggacacaagcacagggttagaggaggtgatggagcaactcaacaactccttccctagttcaagaggaagaaatacccctggaaagccaatgagagaggacacaatgtaggaagtcttttccacatggcagatgatttgggcagagcgatggagtccttagtatcagtcatgacagatgaagaaggagcagaataaatgttttacaactcctgattcccgcatggtttttataatattcatacaacaaagaggattagacagtaagagtttacaagaaataaatctatatttttgtgaagggtagtggtattatactgtagatttcagtagtttctaagtctgttattgttttgttaacaatggcaggttttacacgtctatgcaattgtacaaaaaagttataagaaaactacatgtaaaatcttgatagctaaataacttgccatttctttatatggaacgcattttgggttgtttaaaaatttataacagttataaagaaagattgtaaactaaagtgtgctttataaaaaaaagttgtttataaaaacccctaaaaacaaaacaaacacacacacacacacatacacacacacacacaaaactttgaggcagcgcattgttttgcatccttttggcgtgatatccatatgaaattcatggctttttctttttttgcatattaaagataagacttcctctaccaccacaccaaatgactactacacactgctcatttgagaactgtcagctgagtggggcaggcttgagttttcatttcatatatctatatgtctataagtatataaatactatagttatatagataaagagatacgaatttctatagactgactttttccattttttaaatgttcatgtcacatcctaatagaaagaaattacttctagtcagtcatccaggcttacctgcttggtctagaatggatttttcccggagccggaagccaggaggaaactacaccacactaaaacattgtctacagctccagatgtttctcattttaaacaactttccactgacaacgaaagtaaagtaaagtattggatttttttaaagggaacatgtgaatgaatacacaggacttattatatcagagtgagtaatcggttggttggttgattgattgattgattgatacattcagcttcctgctgctagcaatgccacgatttagatttaatgatgcttcagtggaaatcaatcagaaggtattctgaccttgtgaacatcagaaggtattttttaactcccaagcagtagcaggacgatgatagggctggagggctatggattcccagcccatccctgtgaaggagtaggccactctttaagtgaaggattggatgattgttcataatacataaagttctctgtaattacaactaaattattatgccctcttctcacagtcaaaaggaactgggtggtttggtttttgttgcttttttagatttattgtcccatgtgggatgagtttttaaatgccacaagacataatttaaaataaataaactttgggaaaaggtgtaaaacagtagccccatcacatttgtgatactgacaggtatcaacccagaagcccatgaactgtgtttccatcctttgcatttctctgcgagtagttccacacaggtttgtaagtaagtaagaaagaaggcaaattgattcaaatgttacaaaaaaacccttcttggtggattagacaggttaaatatataaacaaacaaacaaaaattgctcaaaaaagaggagaaaagctcaagaggaaaagctaaggactggtaggaaaaagctttactctttcatgccattttatttctttttgatttttaaatcattcattcaatagataccaccgtgtgacctataattttgcaaatctgttacctctgacatcaagtgtaattagcttttggagagtgggctgacatcaagtgtaattagcttttggagagtgggttttgtccattattaataattaattaattaacatcaaacacggcttctcatgctatttctacctcactttggttttggggtgttcctgataattgtgcacacctgagttcacagcttcaccacttgtccattgcgttattttctttttcctttataattctttctttttccttcataattttcaaaagaaaacccaaagctctaaggtaacaaattaccaaattacatgaagatttggtttttgtcttgcatttttttcctttatgtgacgctggaccttttctttacccaaggatttttaaaactcagatttaaaacaaggggttactttacatcctactaagaagtttaagtaagtaagtttcattctaaaatcagaggtaaatagagtgcataaataattttgttttaatctttttgtttttcttttagacacattagctctggagtgagtctgtcataatatttgaacaaaaattgagagctttattgctgcattttaagcataattaatttggacattatttcgtgttgtgttctttataaccaccaagtattaaactgtaaatcataatgtaactgaagcataaacatcacatggcatgttttgtcattgttttcaggtactgagttcttacttgagtatcataatatattgtgttttaacaccaacactgtaacatttacgaattatttttttaaacttcagttttactgcattttcacaacatatcagacttcaccaaatatatgccttactattgtattatagtactgctttactgtgtatctcaataaagcacgcagttatgttac

SEQ ID NO: 11 - protein, 3681 aa, Homo sapiens
MSEVSSDEREDVQKKTFTKWVNAQFSKFGKQHIENLFSDLQDGRRLLDLLEGLTGQKLPKEKGSTRVHALNNVNKALRVLQNNNVDLVNIGSTDIVDGNHKLTLGLIWNIILHWQVKNVMKNIMAGLQQTNSEKILLSWVRQSTRNYPQVNVINFTTSWSDGLALNALIHSHRPDLFDWNSVVCQQSATQRLEHAFNIARYQLGIEKLLDPEDVDTTYPDKKSILMYITSLFQVLPQQVSIEAIQEVEMLPRPPKVTKEEHFQLHHQMHYSQQITVSLAQGYERTSSPKPRFKSYAYTQAAYVTTSDPTRSPFPSQHLEAPEDKSFGSSLMESEVNLDRYQTALEEVLSWLLSAEDTLQAQGEISNDVEVVKDQFHTHEGYMMDLTAHQGRVGNILQLGSKLIGTGKLSEDEETEVQEQMNLLNSRWECLRVASMEKQSNLHRVLMDLQNQKLKELNDWLTKTEERTRKMEEEPLGPDLEDLKRQVQQHKVLQEDLEQEQVRVNSLTHMVVVVDESSGDHATAALEEQLKVLGDRWANICRWTEDRWVLLQDILLKWQRLTEEQCLFSAWLSEKEDAVNKIHTTGFKDQNEMLSSLQKLAVLKADLEKKKQSMGKLYSLKQDLLSTLKNKSVTQKTEAWLDNFARCWDNLVQKLEKSTAQISQAVTTTQPSLTQTTVMETVTTVTTREQILVKHAQEELPPPPPQKKRQITVDSEIRKRLDVDITELHSWITRSEAVLQSPEFAIFRKEGNFSDLKEKVNAIEREKAEKFRKLQDASRSAQALVEQMVNEGVNADSIKQASEQLNSRWIEFCQLLSERLNWLEYQNNIIAFYNQLQQLEQMTTTAENWLKIQPTTPSEPTAIKSQLKICKDEVNRLSGLQPQIERLKIQSIALKEKGQGPMFLDADFVAFTNHFKQVFSDVQAREKELQTIFDTLPPMRYQETMSAIRTWVQQSETKLSIPQLSVTDYEIMEQRLGELQALQSSLQEQQSGLYYLSTTVKEMSKKAPSEISRKYQSEFEEIEGRWKKLSSQLVEHCQKLEEQMNKLRKIQNHIQTLKKWMAEVDVFLKEEWPALGDSEILKKQLKQCRLLVSDIQTIQPSLNSVNEGGQKIKNEAEPEFASRLETELKELNTQWDHMCQQVYARKEALKGGLEKTVSLQKDLSEMHEWMTQAEEEYLERDFEYKTPDELQKAVEEMKRAKEEAQQKEAKVKLLTESVNSVIAQAPPVAQEALKKELETLTTNYQWLCTRLNGKCKTLEEVWACWHELLSYLEKANKWLNEVEFKLKTTENIPGGAEEISEVLDSLENLMRHSEDNPNQIRILAQTLTDGGVMDELINEELETFNSRWRELHEEAVRRQKLLEQSIQSAQETEKSLHLIQESLTFIDKQLAAYIADKVDAAQMPQEAQKIQSDLTSHEISLEEMKKHNQGKEAAQRVLSQIDVAQKKLQDVSMKFRLFQKPANFEQRLQESKMILDEVKMHLPALETKSVEQEVVQSQLNHCVNLYKSLSEVKSEVEMVIKTGRQIVQKKQTENPKELDERVTALKLHYNELGAKVTERKQQLEKCLKLSRKMRKEMNVLTEWLAATDMELTKRSAVEGMPSNLDSEVAWGKATQKEIEKQKVHLKSITEVGEALKTVLGKKETLVEDKLSLLNSNWIAVTSRAEEWLNLLLEYQKHMETFDQNVDHITKWIIQADTLLDESEKKKPQQKEDVLKRLKAELNDIRPKVDSTRDQAANLMANRGDHCRKLVEPQISELNHRFAAISHRIKTGKASIPLKELEQFNSDIQKLLEPLEAEIQQGVNLKEEDFNKDMNEDNEGTVKELLQRGDNLQQRITDERKREEIKIKQQLLQTKHNALKDLRSQRRKKALEISHQWYQYKRQADDLLKCLDDIEKKLASLPEPRDERKIKEIDRELQKKKEELNAVRRQAEGLSEDGAAMAVEPTQIQLSKRWREIESKFAQFRRLNFAQIHTVREETMMVMTEDMPLEISYVPSTYLTEITHVSQALLEVEQLLNAPDLCAKDFEDLFKQEESLKNIKDSLQQSSGRIDIIHSKKTAALQSATPVERVKLQEALSQLDFQWEKVNKMYKDRQGRFDRSVEKWRRFHYDIKIFNQWLTEAEQFLRKTQIPENWEHAKYKWYLKELQDGIGQRQTVVRTLNATGEEIIQQSSKTDASILQEKLGSLNLRWQEVCKQLSDRKKRLEEQKNILSEFQRDLNEFVLWLEEADNIASIPLEPGKEQQLKEKLEQVKLLVEELPLRQGILKQLNETGGPVLVSAPISPEEQDKLENKLKQTNLQWIKVSRALPEKQGEIEAQIKDLGQLEKKLEDLEEQLNHLLLWLSPIRNQLEIYNQPNQEGPFDVQETEIAVQAKQPDVEEILSKGQHLYKEKPATQPVKRKLEDLSSEWKAVNRLLQELRAKQPDLAPGLTTIGASPTQTVTLVTQPVVTKETAISKLEMPSSLMLEVPALADFNRAWTELTDWLSLLDQVIKSQRVMVGDLEDINEMIIKQKATMQDLEQRRPQLEELITAAQNLKNKTSNQEARTIITDRIERIQNQWDEVQEHLQNRRQQLNEMLKDSTQWLEAKEEAEQVLGQARAKLESWKEGPYTVDAIQKKITETKQLAKDLRQWQTNVDVANDLALKLLRDYSADDTRKVHMITENINASWRSIHKRVSEREAALEETHRLLQQFPLDLEKFLAWLTEAETTANVLQDATRKERLLEDSKGVKELMKQWQDLQGEIEAHTDVYHNLDENSQKILRSLEGSDDAVLLQRRLDNMNFKWSELRKKSLNIRSHLEASSDQWKRLHLSLQELLVWLQLKDDELSRQAPIGGDFPAVQKQNDVHRAFKRELKTKEPVIMSTLETVRIFLTEQPLEGLEKLYQEPRELPPEERAQNVTRLLRKQAEEVNTEWEKLNLHSADWQRKIDETLERLQELQEATDELDLKLRQAEVIKGSWQPVGDLLIDSLQDHLEKVKALRGEIAPLKENVSHVNDLARQLTTLGIQLSPYNLSTLEDLNTRWKLLQVAVEDRVRQLHEAHRDFGPASQHFLSTSVQGPWERAISPNKVPYYINHETQTTCWDHPKMTELYQSLADLNNVRFSAYRTAMKLRRLQKALCLDLLSLSAACDALDQHNLKQNDQPMDILQIINCLTTIYDRLEQEHNNLVNVPLCVDMCLNWLLNVYDTGRTGRIRVLSFKTGIISLCKAHLEDKYRYLFKQVASSTGFCDQRRLGLLLHDSIQIPRQLGEVASFGGSNIEPSVRSCFQFANNKPEIEAALFLDWMRLEPQSMVWLPVLHRVAAAETAKHQAKCNICKECPIIGFRYRSLKHFNYDICQSCFFSGRVAKGHKMHYPMVEYCTPTTSGEDVRDFAKVLKNKFRTKRYFAKHPRMGYLPVQTVLEGDNMETPVTLINFWPVDSAPASSPQLSHDDTHSRIEHYASRLAEMENSNGSYLNDSISPNESIDDEHLLIQHYCQSLNQDSPLSQPRSPAQILISLESEERGELERILADLEEENRNLQAEYDRLKQQHEHKGLSPLPSPPEMMPTSPQSPRDAELIAEAKLLRQHKGRLEARMQILEDHNKQLESQLHRLRQLLEQPQAEAKVNGTTVSSPSTSLQRSDSSQPMLLRVVGSQTSDSMGEEDLLSPPQDTSTGLEEVMEQLNNSFPSSRGRNTPGKPMREDTM

SEQ ID NO: 12 - DNA, 9771 bp, Homo sapiens
taatgagatcaggaggaacattcgacctgagaaagacagattgcaatgactgagatgattttgctaattttttttccagcctatttccttaatgctgtaaggaggcaaaagttgcttgaacagagcatccagtctgcccaggagactgaaaaatccttacacttaatccaggagtccctcacattcattgacaagcagttggcagcttatattgcagacaaggtggacgcagctcaaatgcctcaggaagcccagaaaatccaatctgatttgacaagtcatgagatcagtttagaagaaatgaagaaacataatcaggggaaggaggctgcccaaagagtcctgtctcagattgatgttgcacagaaaaaattacaagatgtctccatgaagtttcgattattccagaaaccagccaattttgagcagcgtctacaagaaagtaagatgattttagatgaagtgaagatgcacttgcctgcattggaaacaaagagtgtggaacaggaagtagtacagtcacagctaaatcattgtgtgaacttgtataaaagtctgagtgaagtgaagtctgaagtggaaatggtgataaagactggacgtcagattgtacagaaaaagcagacggaaaatcccaaagaacttgatgaaagagtaacagctttgaaattgcattataatgagctgggagcaaaggtaacagaaagaaagcaacagttggagaaatgcttgaaattgtcccgtaagatgcgaaaggaaatgaatgtcttgacagaatggctggcagctacagatatggaattgacaaagagatcagcagttgaaggaatgcctagtaatttggattctgaagttgcctggggaaaggctactcaaaaagagattgagaaacagaaggtgcacctgaagagtatcacagaggtaggagaggccttgaaaacagttttgggcaagaaggagacgttggtggaagataaactcagtcttctgaatagtaactggatagctgtcacctcccgagcagaagagtggttaaatcttttgttggaataccagaaacacatggaaacttttgaccagaatgtggaccacatcacaaagtggatcattcaggctgacacacttttggatgaatcagagaaaaagaaaccccagcaaaaagaagacgtgcttaagcgtttaaaggcagaactgaatgacatacgcccaaaggtggactctacacgtgaccaagcagcaaacttgatggcaaaccgcggtgaccactgcaggaaattagtagagccccaaatctcagagctcaaccatcgatttgcagccatttcacacagaattaagactggaaaggcctccattcctttgaaggaattggagcagtttaactcagatatacaaaaattgcttgaaccactggaggctgaaattcagcagggggtgaatctgaaagaggaagacttcaataaagatatgaatgaagacaatgagggtactgtaaaagaattgttgcaaagaggagacaacttacaacaaagaatcacagatgagagaaagcgagaggaaataaagataaaacagcagctgttacagacaaaacataatgctctcaaggatttgaggtctcaaagaagaaaaaaggctctagaaatttctcatcagtggtatcagtacaagaggcaggctgatgatctcctgaaatgcttggatgacattgaaaaaaaattagccagcctacctgagcccagagatgaaaggaaaataaaggaaattgatcgggaattgcagaagaagaaagaggagctgaatgcagtgcgtaggcaagctgagggcttgtctgaggatggggccgcaatggcagtggagccaactcagatccagctcagcaagcgctggcgggaaattgagagcaaatttgctcagtttcgaagactcaactttgcacaaattcacactgtccgtgaagaaacgatgatggtgatgactgaagacatgcctttggaaatttcttatgtgccttctacttatttgactgaaatcactcatgtctcacaagccctattagaagtggaacaacttctcaatgctcctgacctctgtgctaaggactttgaagatctctttaagcaagaggagtctctgaagaatataaaagatagtctacaacaaagctcaggtcggattgacattattcatagcaagaagacagcagcattgcaaagtgcaacgcctgtggaaagggtgaagctacaggaagctctctcccagcttgatttccaatgggaaaaagttaacaaaatgtacaaggaccgacaagggcgatttgacagatctgttgagaaatggcggcgttttcattatgatataaagatatttaatcagtggctaacagaagctgaacagtttctcagaaagacacaaattcctgagaattgggaacatgctaaatacaaatggtatcttaaggaactccaggatggcattgggcagcggcaaactgttgtcagaacattgaatgcaactggggaagaaataattcagcaatcctcaaaaacagatgccagtattctacaggaaaaattgggaagcctgaatctgcggtggcaggaggtctgcaaacagctgtcagacagaaaaaagaggctagaagaacaaaagaatatcttgtcagaatttcaaagagatttaaatgaatttgttttatggttggaggaagcagataacattgctagtatcccacttgaacctggaaaagagcagcaactaaaagaaaagcttgagcaagtcaagttactggtggaagagttgcccctgcgccagggaattctcaaacaattaaatgaaactggaggacccgtgcttgtaagtgctcccataagcccagaagagcaagataaacttgaaaataagctcaagcagacaaatctccagtggataaaggtttccagagctttacctgagaaacaaggagaaattgaagctcaaataaaagaccttgggcagcttgaaaaaaagcttgaagaccttgaagagcagttaaatcatctgctgctgtggttatctcctattaggaatcagttggaaatttataaccaaccaaaccaagaaggaccatttgacgttcaggaaactgaaatagcagttcaagctaaacaaccggatgtggaagagattttgtctaaagggcagcatttgtacaaggaaaaaccagccactcagccagtgaagaggaagttagaagatctgagctctgagtggaaggcggtaaaccgtttacttcaagagctgagggcaaagcagcctgacctagctcctggactgaccactattggagcctctcctactcagactgttactctggtgacacaacctgtggttactaaggaaactgccatctccaaactagaaatgccatcttccttgatgttggaggtacctgctctggcagatttcaaccgggcttggacagaacttaccgactggctttctctgcttgatcaagttataaaatcacagagggtgatggtgggtgaccttgaggatatcaacgagatgatcatcaagcagaaggcaacaatgcaggatttggaacagaggcgtccccagttggaagaactcattaccgctgcccaaaatttgaaaaacaagaccagcaatcaagaggctagaacaatcattacggatcgaattgaaagaattcagaatcagtgggatgaagtacaagaacaccttcagaaccggaggcaacagttgaatgaaatgttaaaggattcaacacaatggctggaagctaaggaagaagctgagcaggtcttaggacaggccagagccaagcttgagtcatggaaggagggtccctatacagtagatgcaatccaaaagaaaatcacagaaaccaagcagttggccaaagacctccgccagtggcagacaaatgtagatgtggcaaatgacttggccctgaaacttctccgggattattctgcagatgataccagaaaagtccacatgataacagagaatatcaatgcctcttggagaagcattcataaaagggtgagtgagcgagaggctgctttggaagaaactcatagattactgcaacagttccccctggacctggaaaagtttcttgcctggcttacagaagctgaaacaactgccaatgtcctacaggatgctacccgtaaggaaaggctcctagaagactccaagggagtaaaagagctgatgaaacaatggcaagacctccaaggtgaaattgaagctcacacagatgtttatcacaacctggatgaaaacagccaaaaaatcctgagatccctggaaggttccgatgatgcagtcctgttacaaagacgtttggataacatgaacttcaagtggagtgaacttcggaaaaagtctctcaacattaggtcccatttggaagccagttctgaccagtggaagcgtctgcacctttctctgcaggaacttctggtgtggctacagctgaaagatgatgaattaagccggcaggcacctattggaggcgactttccagcagttcagaagcagaacgatgtacatagggccttcaagagggaattgaaaactaaagaacctgtaatcatgagtactcttgagactgtacgaatatttctgacagagcagcctttggaaggactagagaaactctaccaggagcccagagagctgcctcctgaggagagagcccagaatgtcactcggcttctacgaaagcaggctgaggaggtcaatactgagtgggaaaaattgaacctgcactccgctgactggcagagaaaaatagatgagacccttgaaagactccaggaacttcaagaggccacggatgagctggacctcaagctgcgccaagctgaggtgatcaagggatcctggcagcccgtgggcgatctcctcattgactctctccaagatcacctcgagaaagtcaaggcacttcgaggagaaattgcgcctctgaaagagaacgtgagccacgtcaatgaccttgctcgccagcttaccactttgggcattcagctctcaccgtataacctcagcactctggaagacctgaacaccagatggaagcttctgcaggtggccgtcgaggaccgagtcaggcagctgcatgaagcccacagggactttggtccagcatctcagcactttctttccacgtctgtccagggtccctgggagagagccatctcgccaaacaaagtgccctactatatcaaccacgagactcaaacaacttgctgggaccatcccaaaatgacagagctctaccagtctttagctgacctgaataatgtcagattctcagcttataggactgccatgaaactccgaagactgcagaaggccctttgcttggatctcttgagcctgtcagctgcatgtgatgccttggaccagcacaacctcaagcaaaatgaccagcccatggatatcctgcagattattaattgtttgaccactatttatgaccgcctggagcaagagcacaacaatttggtcaacgtccctctctgcgtggatatgtgtctgaactggctgctgaatgtttatgatacgggacgaacagggaggatccgtgtcctgtcttttaaaactggcatcatttccctgtgtaaagcacatttggaagacaagtacagataccttttcaagcaagtggcaagttcaacaggattttgtgaccagcgcaggctgggcctccttctgcatgattctatccaaattccaagacagttgggtgaagttgcatcctttgggggcagtaacattgagccaagtgtccggagctgcttccaatttgctaataataagccagagatcgaagcggccctcttcctagactggatgagactggaaccccagtccatggtgtggctgcccgtcctgcacagagtggctgctgcagaaactgccaagcatcaggccaaatgtaacatctgcaaagagtgtccaatcattggattcaggtacaggagtctaaagcactttaattatgacatctgccaaagctgctttttttctggtcgagttgcaaaaggccataaaatgcactatcccatggtggaatattgcactccgactacatcaggagaagatgttcgagactttgccaaggtactaaaaaacaaatttcgaaccaaaaggtattttgcgaagcatccccgaatgggctacctgccagtgcagactgtcttagagggggacaacatggaaactcccgttactctgatcaacttctggccagtagattctgcgcctgcctcgtcccctcagctttcacacgatgatactcattcacgcattgaacattatgctagcaggctagcagaaatggaaaacagcaatggatcttatctaaatgatagcatctctcctaatgagagcatagatgatgaacatttgttaatccagcattactgccaaagtttgaaccaggactcccccctgagccagcctcgtagtcctgcccagatcttgatttccttagagagtgaggaaagaggggagctagagagaatcctagcagatcttgaggaagaaaacaggaatctgcaagcagaatatgaccgtctaaagcagcagcacgaacataaaggcctgtccccactgccgtcccctcctgaaatgatgcccacctctccccagagtccccgggatgctgagctcattgctgaggccaagctactgcgtcaacacaaaggccgcctggaagccaggatgcaaatcctggaagaccacaataaacagctggagtcacagttacacaggctaaggcagctgctggagcaaccccaggcagaggccaaagtgaatggcacaacggtgtcctctccttctacctctctacagaggtccgacagcagtcagcctatgctgctccgagtggttggcagtcaaacttcggactccatgggtgaggaagatcttctcagtcctccccaggacacaagcacagggttagaggaggtgatggagcaactcaacaactccttccctagttcaagaggaagaaatacccctggaaagccaatgagagaggacacaatgtaggaagtcttttccacatggcagatgatttgggcagagcgatggagtccttagtatcagtcatgacagatgaagaaggagcagaataaatgttttacaactcctgattcccgcatggtttttataatattcatacaacaaagaggattagacagtaagagtttacaagaaataaatctatatttttgtgaagggtagtggtattatactgtagatttcagtagtttctaagtctgttattgttttgttaacaatggcaggttttacacgtctatgcaattgtacaaaaaagttataagaaaactacatgtaaaatcttgatagctaaataacttgccatttctttatatggaacgcattttgggttgtttaaaaatttataacagttataaagaaagattgtaaactaaagtgtgctttataaaaaaaagttgtttataaaaacccctaaaaacaaaacaaacacacacacacacacatacacacacacacacaaaactttgaggcagcgcattgttttgcatccttttggcgtgatatccatatgaaattcatggctttttctttttttgcatattaaagataagacttcctctaccaccacaccaaatgactactacacactgctcatttgagaactgtcagctgagtggggcaggcttgagttttcatttcatatatctatatgtctataagtatataaatactatagttatatagataaagagatacgaatttctatagactgactttttccattttttaaatgttcatgtcacatcctaatagaaagaaattacttctagtcagtcatccaggcttacctgcttggtctagaatggatttttcccggagccggaagccaggaggaaactacaccacactaaaacattgtctacagctccagatgtttctcattttaaacaactttccactgacaacgaaagtaaagtaaagtattggatttttttaaagggaacatgtgaatgaatacacaggacttattatatcagagtgagtaatcggttggttggttgattgattgattgattgatacattcagcttcctgctgctagcaatgccacgatttagatttaatgatgcttcagtggaaatcaatcagaaggtattctgaccttgtgaacatcagaaggtattttttaactcccaagcagtagcaggacgatgatagggctggagggctatggattcccagcccatccctgtgaaggagtaggccactctttaagtgaaggattggatgattgttcataatacataaagttctctgtaattacaactaaattattatgccctcttctcacagtcaaaaggaactgggtggtttggtttttgttgcttttttagatttattgtcccatgtgggatgagtttttaaatgccacaagacataatttaaaataaataaactttgggaaaaggtgtaaaacagtagccccatcacatttgtgatactgacaggtatcaacccagaagcccatgaactgtgtttccatcctttgcatttctctgcgagtagttccacacaggtttgtaagtaagtaagaaagaaggcaaattgattcaaatgttacaaaaaaacccttcttggtggattagacaggttaaatatataaacaaacaaacaaaaattgctcaaaaaagaggagaaaagctcaagaggaaaagctaaggactggtaggaaaaagctttactctttcatgccattttatttctttttgatttttaaatcattcattcaatagataccaccgtgtgacctataattttgcaaatctgttacctctgacatcaagtgtaattagcttttggagagtgggctgacatcaagtgtaattagcttttggagagtgggttttgtccattattaataattaattaattaacatcaaacacggcttctcatgctatttctacctcactttggttttggggtgttcctgataattgtgcacacctgagttcacagcttcaccacttgtccattgcgttattttctttttcctttataattctttctttttccttcataattttcaaaagaaaacccaaagctctaaggtaacaaattaccaaattacatgaagatttggtttttgtcttgcatttttttcctttatgtgacgctggaccttttctttacccaaggatttttaaaactcagatttaaaacaaggggttactttacatcctactaagaagtttaagtaagtaagtttcattctaaaatcagaggtaaatagagtgcataaataattttgttttaatctttttgtttttcttttagacacattagctctggagtgagtctgtcataatatttgaacaaaaattgagagctttattgctgcattttaagcataattaatttggacattatttcgtgttgtgttctttataaccaccaagtattaaactgtaaatcataatgtaactgaagcataaacatcacatggcatgttttgtcattgttttcaggtactgagttcttacttgagtatcataatatattgtgttttaacaccaacactgtaacatttacgaattatttttttaaacttcagttttactgcattttcacaacatatcagacttcaccaaatatatgccttactattgtattatagtactgctttactgtgtatctcaataaagcacgcagttatgttac

SEQ ID NO: 13 - protein, 2344 aa, Homo sapiens
MTEMILLIFFPAYFLNAVRRQKLLEQSIQSAQETEKSLHLIQESLTFIDKQLAAYIADKVDAAQMPQEAQKIQSDLTSHEISLEEMKKHNQGKEAAQRVLSQIDVAQKKLQDVSMKFRLFQKPANFEQRLQESKMILDEVKMHLPALETKSVEQEVVQSQLNHCVNLYKSLSEVKSEVEMVIKTGRQIVQKKQTENPKELDERVTALKLHYNELGAKVTERKQQLEKCLKLSRKMRKEMNVLTEWLAATDMELTKRSAVEGMPSNLDSEVAWGKATQKEIEKQKVHLKSITEVGEALKTVLGKKETLVEDKLSLLNSNWIAVTSRAEEWLNLLLEYQKHMETFDQNVDHITKWIIQADTLLDESEKKKPQQKEDVLKRLKAELNDIRPKVDSTRDQAANLMANRGDHCRKLVEPQISELNHRFAAISHRIKTGKASIPLKELEQFNSDIQKLLEPLEAEIQQGVNLKEEDFNKDMNEDNEGTVKELLQRGDNLQQRITDERKREEIKIKQQLLQTKHNALKDLRSQRRKKALEISHQWYQYKRQADDLLKCLDDIEKKLASLPEPRDERKIKEIDRELQKKKEELNAVRRQAEGLSEDGAAMAVEPTQIQLSKRWREIESKFAQFRRLNFAQIHTVREETMMVMTEDMPLEISYVPSTYLTEITHVSQALLEVEQLLNAPDLCAKDFEDLFKQEESLKNIKDSLQQSSGRIDIIHSKKTAALQSATPVERVKLQEALSQLDFQWEKVNKMYKDRQGRFDRSVEKWRRFHYDIKIFNQWLTEAEQFLRKTQIPENWEHAKYKWYLKELQDGIGQRQTVVRTLNATGEEIIQQSSKTDASILQEKLGSLNLRWQEVCKQLSDRKKRLEEQKNILSEFQRDLNEFVLWLEEADNIASIPLEPGKEQQLKEKLEQVKLLVEELPLRQGILKQLNETGGPVLVSAPISPEEQDKLENKLKQTNLQWIKVSRALPEKQGEIEAQIKDLGQLEKKLEDLEEQLNHLLLWLSPIRNQLEIYNQPNQEGPFDVQETEIAVQAKQPDVEEILSKGQHLYKEKPATQPVKRKLEDLSSEWKAVNRLLQELRAKQPDLAPGLTTIGASPTQTVTLVTQPVVTKETAISKLEMPSSLMLEVPALADFNRAWTELTDWLSLLDQVIKSQRVMVGDLEDINEMIIKQKATMQDLEQRRPQLEELITAAQNLKNKTSNQEARTIITDRIERIQNQWDEVQEHLQNRRQQLNEMLKDSTQWLEAKEEAEQVLGQARAKLESWKEGPYTVDAIQKKITETKQLAKDLRQWQTNVDVANDLALKLLRDYSADDTRKVHMITENINASWRSIHKRVSEREAALEETHRLLQQFPLDLEKFLAWLTEAETTANVLQDATRKERLLEDSKGVKELMKQWQDLQGEIEAHTDVYHNLDENSQKILRSLEGSDDAVLLQRRLDNMNFKWSELRKKSLNIRSHLEASSDQWKRLHLSLQELLVWLQLKDDELSRQAPIGGDFPAVQKQNDVHRAFKRELKTKEPVIMSTLETVRIFLTEQPLEGLEKLYQEPRELPPEERAQNVTRLLRKQAEEVNTEWEKLNLHSADWQRKIDETLERLQELQEATDELDLKLRQAEVIKGSWQPVGDLLIDSLQDHLEKVKALRGEIAPLKENVSHVNDLARQLTTLGIQLSPYNLSTLEDLNTRWKLLQVAVEDRVRQLHEAHRDFGPASQHFLSTSVQGPWERAISPNKVPYYINHETQTTCWDHPKMTELYQSLADLNNVRFSAYRTAMKLRRLQKALCLDLLSLSAACDALDQHNLKQNDQPMDILQIINCLTTIYDRLEQEHNNLVNVPLCVDMCLNWLLNVYDTGRTGRIRVLSFKTGIISLCKAHLEDKYRYLFKQVASSTGFCDQRRLGLLLHDSIQIPRQLGEVASFGGSNIEPSVRSCFQFANNKPEIEAALFLDWMRLEPQSMVWLPVLHRVAAAETAKHQAKCNICKECPIIGFRYRSLKHFNYDICQSCFFSGRVAKGHKMHYPMVEYCTPTTSGEDVRDFAKVLKNKFRTKRYFAKHPRMGYLPVQTVLEGDNMETPVTLINFWPVDSAPASSPQLSHDDTHSRIEHYASRLAEMENSNGSYLNDSISPNESIDDEHLLIQHYCQSLNQDSPLSQPRSPAQILISLESEERGELERILADLEEENRNLQAEYDRLKQQHEHKGLSPLPSPPEMMPTSPQSPRDAELIAEAKLLRQHKGRLEARMQILEDHNKQLESQLHRLRQLLEQPQAEAKVNGTTVSSPSTSLQRSDSSQPMLLRVVGSQTSDSMGEEDLLSPPQDTSTGLEEVMEQLNNSFPSSRGRNTPGKPMREDTM

SEQ ID NO: 14 - DNA, 9914 bp, Homo sapiens
taatgagatcaggaggaacattcgacctgagaaagacagattgcaatgactgagatgattttgctaattttttttccagcctatttccttaatgtacgtgatattgtgattgattttcatgcagagatccctgatcctatagttttgtttgctatttatttttctccttcacattttttttctatcaacagagctgaatgagtgccaggaagctgcgaaatctgtcttacaaaaaggctgtaaggaggcaaaagttgcttgaacagagcatccagtctgcccaggagactgaaaaatccttacacttaatccaggagtccctcacattcattgacaagcagttggcagcttatattgcagacaaggtggacgcagctcaaatgcctcaggaagcccagaaaatccaatctgatttgacaagtcatgagatcagtttagaagaaatgaagaaacataatcaggggaaggaggctgcccaaagagtcctgtctcagattgatgttgcacagaaaaaattacaagatgtctccatgaagtttcgattattccagaaaccagccaattttgagcagcgtctacaagaaagtaagatgattttagatgaagtgaagatgcacttgcctgcattggaaacaaagagtgtggaacaggaagtagtacagtcacagctaaatcattgtgtgaacttgtataaaagtctgagtgaagtgaagtctgaagtggaaatggtgataaagactggacgtcagattgtacagaaaaagcagacggaaaatcccaaagaacttgatgaaagagtaacagctttgaaattgcattataatgagctgggagcaaaggtaacagaaagaaagcaacagttggagaaatgcttgaaattgtcccgtaagatgcgaaaggaaatgaatgtcttgacagaatggctggcagctacagatatggaattgacaaagagatcagcagttgaaggaatgcctagtaatttggattctgaagttgcctggggaaaggctactcaaaaagagattgagaaacagaaggtgcacctgaagagtatcacagaggtaggagaggccttgaaaacagttttgggcaagaaggagacgttggtggaagataaactcagtcttctgaatagtaactggatagctgtcacctcccgagcagaagagtggttaaatcttttgttggaataccagaaacacatggaaacttttgaccagaatgtggaccacatcacaaagtggatcattcaggctgacacacttttggatgaatcagagaaaaagaaaccccagcaaaaagaagacgtgcttaagcgtttaaaggcagaactgaatgacatacgcccaaaggtggactctacacgtgaccaagcagcaaacttgatggcaaaccgcggtgaccactgcaggaaattagtagagccccaaatctcagagctcaaccatcgatttgcagccatttcacacagaattaagactggaaaggcctccattcctttgaaggaattggagcagtttaactcagatatacaaaaattgcttgaaccactggaggctgaaattcagcagggggtgaatctgaaagaggaagacttcaataaagatatgaatgaagacaatgagggtactgtaaaagaattgttgcaaagaggagacaacttacaacaaagaatcacagatgagagaaagcgagaggaaataaagataaaacagcagctgttacagacaaaacataatgctctcaaggatttgaggtctcaaagaagaaaaaaggctctagaaatttctcatcagtggtatcagtacaagaggcaggctgatgatctcctgaaatgcttggatgacattgaaaaaaaattagccagcctacctgagcccagagatgaaaggaaaataaaggaaattgatcgggaattgcagaagaagaaagaggagctgaatgcagtgcgtaggcaagctgagggcttgtctgaggatggggccgcaatggcagtggagccaactcagatccagctcagcaagcgctggcgggaaattgagagcaaatttgctcagtttcgaagactcaactttgcacaaattcacactgtccgtgaagaaacgatgatggtgatgactgaagacatgcctttggaaatttcttatgtgccttctacttatttgactgaaatcactcatgtctcacaagccctattagaagtggaacaacttctcaatgctcctgacctctgtgctaaggactttgaagatctctttaagcaagaggagtctctgaagaatataaaagatagtctacaacaaagctcaggtcggattgacattattcatagcaagaagacagcagcattgcaaagtgcaacgcctgtggaaagggtgaagctacaggaagctctctcccagcttgatttccaatgggaaaaagttaacaaaatgtacaaggaccgacaagggcgatttgacagatctgttgagaaatggcggcgttttcattatgatataaagatatttaatcagtggctaacagaagctgaacagtttctcagaaagacacaaattcctgagaattgggaacatgctaaatacaaatggtatcttaaggaactccaggatggcattgggcagcggcaaactgttgtcagaacattgaatgcaactggggaagaaataattcagcaatcctcaaaaacagatgccagtattctacaggaaaaattgggaagcctgaatctgcggtggcaggaggtctgcaaacagctgtcagacagaaaaaagaggctagaagaacaaaagaatatcttgtcagaatttcaaagagatttaaatgaatttgttttatggttggaggaagcagataacattgctagtatcccacttgaacctggaaaagagcagcaactaaaagaaaagcttgagcaagtcaagttactggtggaagagttgcccctgcgccagggaattctcaaacaattaaatgaaactggaggacccgtgcttgtaagtgctcccataagcccagaagagcaagataaacttgaaaataagctcaagcagacaaatctccagtggataaaggtttccagagctttacctgagaaacaaggagaaattgaagctcaaataaaagaccttgggcagcttgaaaaaaagcttgaagaccttgaagagcagttaaatcatctgctgctgtggttatctcctattaggaatcagttggaaatttataaccaaccaaaccaagaaggaccatttgacgttcaggaaactgaaatagcagttcaagctaaacaaccggatgtggaagagattttgtctaaagggcagcatttgtacaaggaaaaaccagccactcagccagtgaagaggaagttagaagatctgagctctgagtggaaggcggtaaaccgtttacttcaagagctgagggcaaagcagcctgacctagctcctggactgaccactattggagcctctcctactcagactgttactctggtgacacaacctgtggttactaaggaaactgccatctccaaactagaaatgccatcttccttgatgttggaggtacctgctctggcagatttcaaccgggcttggacagaacttaccgactggctttctctgcttgatcaagttataaaatcacagagggtgatggtgggtgaccttgaggatatcaacgagatgatcatcaagcagaaggcaacaatgcaggatttggaacagaggcgtccccagttggaagaactcattaccgctgcccaaaatttgaaaaacaagaccagcaatcaagaggctagaacaatcattacggatcgaattgaaagaattcagaatcagtgggatgaagtacaagaacaccttcagaaccggaggcaacagttgaatgaaatgttaaaggattcaacacaatggctggaagctaaggaagaagctgagcaggtcttaggacaggccagagccaagcttgagtcatggaaggagggtccctatacagtagatgcaatccaaaagaaaatcacagaaaccaagcagttggccaaagacctccgccagtggcagacaaatgtagatgtggcaaatgacttggccctgaaacttctccgggattattctgcagatgataccagaaaagtccacatgataacagagaatatcaatgcctcttggagaagcattcataaaagggtgagtgagcgagaggctgctttggaagaaactcatagattactgcaacagttccccctggacctggaaaagtttcttgcctggcttacagaagctgaaacaactgccaatgtcctacaggatgctacccgtaaggaaaggctcctagaagactccaagggagtaaaagagctgatgaaacaatggcaagacctccaaggtgaaattgaagctcacacagatgtttatcacaacctggatgaaaacagccaaaaaatcctgagatccctggaaggttccgatgatgcagtcctgttacaaagacgtttggataacatgaacttcaagtggagtgaacttcggaaaaagtctctcaacattaggtcccatttggaagccagttctgaccagtggaagcgtctgcacctttctctgcaggaacttctggtgtggctacagctgaaagatgatgaattaagccggcaggcacctattggaggcgactttccagcagttcagaagcagaacgatgtacatagggccttcaagagggaattgaaaactaaagaacctgtaatcatgagtactcttgagactgtacgaatatttctgacagagcagcctttggaaggactagagaaactctaccaggagcccagagagctgcctcctgaggagagagcccagaatgtcactcggcttctacgaaagcaggctgaggaggtcaatactgagtgggaaaaattgaacctgcactccgctgactggcagagaaaaatagatgagacccttgaaagactccaggaacttcaagaggccacggatgagctggacctcaagctgcgccaagctgaggtgatcaagggatcctggcagcccgtgggcgatctcctcattgactctctccaagatcacctcgagaaagtcaaggcacttcgaggagaaattgcgcctctgaaagagaacgtgagccacgtcaatgaccttgctcgccagcttaccactttgggcattcagctctcaccgtataacctcagcactctggaagacctgaacaccagatggaagcttctgcaggtggccgtcgaggaccgagtcaggcagctgcatgaagcccacagggactttggtccagcatctcagcactttctttccacgtctgtccagggtccctgggagagagccatctcgccaaacaaagtgccctactatatcaaccacgagactcaaacaacttgctgggaccatcccaaaatgacagagctctaccagtctttagctgacctgaataatgtcagattctcagcttataggactgccatgaaactccgaagactgcagaaggccctttgcttggatctcttgagcctgtcagctgcatgtgatgccttggaccagcacaacctcaagcaaaatgaccagcccatggatatcctgcagattattaattgtttgaccactatttatgaccgcctggagcaagagcacaacaatttggtcaacgtccctctctgcgtggatatgtgtctgaactggctgctgaatgtttatgatacgggacgaacagggaggatccgtgtcctgtcttttaaaactggcatcatttccctgtgtaaagcacatttggaagacaagtacagataccttttcaagcaagtggcaagttcaacaggattttgtgaccagcgcaggctgggcctccttctgcatgattctatccaaattccaagacagttgggtgaagttgcatcctttgggggcagtaacattgagccaagtgtccggagctgcttccaatttgctaataataagccagagatcgaagcggccctcttcctagactggatgagactggaaccccagtccatggtgtggctgcccgtcctgcacagagtggctgctgcagaaactgccaagcatcaggccaaatgtaacatctgcaaagagtgtccaatcattggattcaggtacaggagtctaaagcactttaattatgacatctgccaaagctgctttttttctggtcgagttgcaaaaggccataaaatgcactatcccatggtggaatattgcactccgactacatcaggagaagatgttcgagactttgccaaggtactaaaaaacaaatttcgaaccaaaaggtattttgcgaagcatccccgaatgggctacctgccagtgcagactgtcttagagggggacaacatggaaactcccgttactctgatcaacttctggccagtagattctgcgcctgcctcgtcccctcagctttcacacgatgatactcattcacgcattgaacattatgctagcaggctagcagaaatggaaaacagcaatggatcttatctaaatgatagcatctctcctaatgagagcatagatgatgaacatttgttaatccagcattactgccaaagtttgaaccaggactcccccctgagccagcctcgtagtcctgcccagatcttgatttccttagagagtgaggaaagaggggagctagagagaatcctagcagatcttgaggaagaaaacaggaatctgcaagcagaatatgaccgtctaaagcagcagcacgaacataaaggcctgtccccactgccgtcccctcctgaaatgatgcccacctctccccagagtccccgggatgctgagctcattgctgaggccaagctactgcgtcaacacaaaggccgcctggaagccaggatgcaaatcctggaagaccacaataaacagctggagtcacagttacacaggctaaggcagctgctggagcaaccccaggcagaggccaaagtgaatggcacaacggtgtcctctccttctacctctctacagaggtccgacagcagtcagcctatgctgctccgagtggttggcagtcaaacttcggactccatgggtgaggaagatcttctcagtcctccccaggacacaagcacagggttagaggaggtgatggagcaactcaacaactccttccctagttcaagaggaagaaatacccctggaaagccaatgagagaggacacaatgtaggaagtcttttccacatggcagatgatttgggcagagcgatggagtccttagtatcagtcatgacagatgaagaaggagcagaataaatgttttacaactcctgattcccgcatggtttttataatattcatacaacaaagaggattagacagtaagagtttacaagaaataaatctatatttttgtgaagggtagtggtattatactgtagatttcagtagtttctaagtctgttattgttttgttaacaatggcaggttttacacgtctatgcaattgtacaaaaaagttataagaaaactacatgtaaaatcttgatagctaaataacttgccatttctttatatggaacgcattttgggttgtttaaaaatttataacagttataaagaaagattgtaaactaaagtgtgctttataaaaaaaagttgtttataaaaacccctaaaaacaaaacaaacacacacacacacacatacacacacacacacaaaactttgaggcagcgcattgttttgcatccttttggcgtgatatccatatgaaattcatggctttttctttttttgcatattaaagataagacttcctctaccaccacaccaaatgactactacacactgctcatttgagaactgtcagctgagtggggcaggcttgagttttcatttcatatatctatatgtctataagtatataaatactatagttatatagataaagagatacgaatttctatagactgactttttccattttttaaatgttcatgtcacatcctaatagaaagaaattacttctagtcagtcatccaggcttacctgcttggtctagaatggatttttcccggagccggaagccaggaggaaactacaccacactaaaacattgtctacagctccagatgtttctcattttaaacaactttccactgacaacgaaagtaaagtaaagtattggatttttttaaagggaacatgtgaatgaatacacaggacttattatatcagagtgagtaatcggttggttggttgattgattgattgattgatacattcagcttcctgctgctagcaatgccacgatttagatttaatgatgcttcagtggaaatcaatcagaaggtattctgaccttgtgaacatcagaaggtattttttaactcccaagcagtagcaggacgatgatagggctggagggctatggattcccagcccatccctgtgaaggagtaggccactctttaagtgaaggattggatgattgttcataatacataaagttctctgtaattacaactaaattattatgccctcttctcacagtcaaaaggaactgggtggtttggtttttgttgcttttttagatttattgtcccatgtgggatgagtttttaaatgccacaagacataatttaaaataaataaactttgggaaaaggtgtaaaacagtagccccatcacatttgtgatactgacaggtatcaacccagaagcccatgaactgtgtttccatcctttgcatttctctgcgagtagttccacacaggtttgtaagtaagtaagaaagaaggcaaattgattcaaatgttacaaaaaaacccttcttggtggattagacaggttaaatatataaacaaacaaacaaaaattgctcaaaaaagaggagaaaagctcaagaggaaaagctaaggactggtaggaaaaagctttactctttcatgccattttatttctttttgatttttaaatcattcattcaatagataccaccgtgtgacctataattttgcaaatctgttacctctgacatcaagtgtaattagcttttggagagtgggctgacatcaagtgtaattagcttttggagagtgggttttgtccattattaataattaattaattaacatcaaacacggcttctcatgctatttctacctcactttggttttggggtgttcctgataattgtgcacacctgagttcacagcttcaccacttgtccattgcgttattttctttttcctttataattctttctttttccttcataattttcaaaagaaaacccaaagctctaaggtaacaaattaccaaattacatgaagatttggtttttgtcttgcatttttttcctttatgtgacgctggaccttttctttacccaaggatttttaaaactcagatttaaaacaaggggttactttacatcctactaagaagtttaagtaagtaagtttcattctaaaatcagaggtaaatagagtgcataaataattttgttttaatctttttgtttttcttttagacacattagctctggagtgagtctgtcataatatttgaacaaaaattgagagctttattgctgcattttaagcataattaatttggacattatttcgtgttgtgttctttataaccaccaagtattaaactgtaaatcataatgtaactgaagcataaacatcacatggcatgttttgtcattgttttcaggtactgagttcttacttgagtatcataatatattgtgttttaacaccaacactgtaacatttacgaattatttttttaaacttcagttttactgcattttcacaacatatcagacttcaccaaatatatgccttactattgtattatagtactgctttactgtgtatctcaataaagcacgcagttatgttac

SEQ ID NO: 15 - protein, 2341 aa, Homo sapiens
MSARKLRNLSYKKAVRRQKLLEQSIQSAQETEKSLHLIQESLTFIDKQLAAYIADKVDAAQMPQEAQKIQSDLTSHEISLEEMKKHNQGKEAAQRVLSQIDVAQKKLQDVSMKFRLFQKPANFEQRLQESKMILDEVKMHLPALETKSVEQEVVQSQLNHCVNLYKSLSEVKSEVEMVIKTGRQIVQKKQTENPKELDERVTALKLHYNELGAKVTERKQQLEKCLKLSRKMRKEMNVLTEWLAATDMELTKRSAVEGMPSNLDSEVAWGKATQKEIEKQKVHLKSITEVGEALKTVLGKKETLVEDKLSLLNSNWIAVTSRAEEWLNLLLEYQKHMETFDQNVDHITKWIIQADTLLDESEKKKPQQKEDVLKRLKAELNDIRPKVDSTRDQAANLMANRGDHCRKLVEPQISELNHRFAAISHRIKTGKASIPLKELEQFNSDIQKLLEPLEAEIQQGVNLKEEDFNKDMNEDNEGTVKELLQRGDNLQQRITDERKREEIKIKQQLLQTKHNALKDLRSQRRKKALEISHQWYQYKRQADDLLKCLDDIEKKLASLPEPRDERKIKEIDRELQKKKEELNAVRRQAEGLSEDGAAMAVEPTQIQLSKRWREIESKFAQFRRLNFAQIHTVREETMMVMTEDMPLEISYVPSTYLTEITHVSQALLEVEQLLNAPDLCAKDFEDLFKQEESLKNIKDSLQQSSGRIDIIHSKKTAALQSATPVERVKLQEALSQLDFQWEKVNKMYKDRQGRFDRSVEKWRRFHYDIKIFNQWLTEAEQFLRKTQIPENWEHAKYKWYLKELQDGIGQRQTVVRTLNATGEEIIQQSSKTDASILQEKLGSLNLRWQEVCKQLSDRKKRLEEQKNILSEFQRDLNEFVLWLEEADNIASIPLEPGKEQQLKEKLEQVKLLVEELPLRQGILKQLNETGGPVLVSAPISPEEQDKLENKLKQTNLQWIKVSRALPEKQGEIEAQIKDLGQLEKKLEDLEEQLNHLLLWLSPIRNQLEIYNQPNQEGPFDVQETEIAVQAKQPDVEEILSKGQHLYKEKPATQPVKRKLEDLSSEWKAVNRLLQELRAKQPDLAPGLTTIGASPTQTVTLVTQPVVTKETAISKLEMPSSLMLEVPALADFNRAWTELTDWLSLLDQVIKSQRVMVGDLEDINEMIIKQKATMQDLEQRRPQLEELITAAQNLKNKTSNQEARTIITDRIERIQNQWDEVQEHLQNRRQQLNEMLKDSTQWLEAKEEAEQVLGQARAKLESWKEGPYTVDAIQKKITETKQLAKDLRQWQTNVDVANDLALKLLRDYSADDTRKVHMITENINASWRSIHKRVSEREAALEETHRLLQQFPLDLEKFLAWLTEAETTANVLQDATRKERLLEDSKGVKELMKQWQDLQGEIEAHTDVYHNLDENSQKILRSLEGSDDAVLLQRRLDNMNFKWSELRKKSLNIRSHLEASSDQWKRLHLSLQELLVWLQLKDDELSRQAPIGGDFPAVQKQNDVHRAFKRELKTKEPVIMSTLETVRIFLTEQPLEGLEKLYQEPRELPPEERAQNVTRLLRKQAEEVNTEWEKLNLHSADWQRKIDETLERLQELQEATDELDLKLRQAEVIKGSWQPVGDLLIDSLQDHLEKVKALRGEIAPLKENVSHVNDLARQLTTLGIQLSPYNLSTLEDLNTRWKLLQVAVEDRVRQLHEAHRDFGPASQHFLSTSVQGPWERAISPNKVPYYINHETQTTCWDHPKMTELYQSLADLNNVRFSAYRTAMKLRRLQKALCLDLLSLSAACDALDQHNLKQNDQPMDILQIINCLTTIYDRLEQEHNNLVNVPLCVDMCLNWLLNVYDTGRTGRIRVLSFKTGIISLCKAHLEDKYRYLFKQVASSTGFCDQRRLGLLLHDSIQIPRQLGEVASFGGSNIEPSVRSCFQFANNKPEIEAALFLDWMRLEPQSMVWLPVLHRVAAAETAKHQAKCNICKECPIIGFRYRSLKHFNYDICQSCFFSGRVAKGHKMHYPMVEYCTPTTSGEDVRDFAKVLKNKFRTKRYFAKHPRMGYLPVQTVLEGDNMETPVTLINFWPVDSAPASSPQLSHDDTHSRIEHYASRLAEMENSNGSYLNDSISPNESIDDEHLLIQHYCQSLNQDSPLSQPRSPAQILISLESEERGELERILADLEEENRNLQAEYDRLKQQHEHKGLSPLPSPPEMMPTSPQSPRDAELIAEAKLLRQHKGRLEARMQILEDHNKQLESQLHRLRQLLEQPQAEAKVNGTTVSSPSTSLQRSDSSQPMLLRVVGSQTSDSMGEEDLLSPPQDTSTGLEEVMEQLNNSFPSSRGRNTPGKPMREDTM

SEQ ID NO: 16 - DNA, 7410 bp, Homo sapiens
acactagcaatggcaaagctttgtgcggaggcattgctggctgctctgaactaaaagcatccgtggggaccgaaagaggtttttgcacaccttattaaggaactccaggatggcattgggcagcggcaaactgttgtcagaacattgaatgcaactggggaagaaataattcagcaatcctcaaaaacagatgccagtattctacaggaaaaattgggaagcctgaatctgcggtggcaggaggtctgcaaacagctgtcagacagaaaaaagaggctagaagaacaaaagaatatcttgtcagaatttcaaagagatttaaatgaatttgttttatggttggaggaagcagataacattgctagtatcccacttgaacctggaaaagagcagcaactaaaagaaaagcttgagcaagtcaagttactggtggaagagttgcccctgcgccagggaattctcaaacaattaaatgaaactggaggacccgtgcttgtaagtgctcccataagcccagaagagcaagataaacttgaaaataagctcaagcagacaaatctccagtggataaaggtttccagagctttacctgagaaacaaggagaaattgaagctcaaataaaagaccttgggcagcttgaaaaaaagcttgaagaccttgaagagcagttaaatcatctgctgctgtggttatctcctattaggaatcagttggaaatttataaccaaccaaaccaagaaggaccatttgacgttcaggaaactgaaatagcagttcaagctaaacaaccggatgtggaagagattttgtctaaagggcagcatttgtacaaggaaaaaccagccactcagccagtgaagaggaagttagaagatctgagctctgagtggaaggcggtaaaccgtttacttcaagagctgagggcaaagcagcctgacctagctcctggactgaccactattggagcctctcctactcagactgttactctggtgacacaacctgtggttactaaggaaactgccatctccaaactagaaatgccatcttccttgatgttggaggtacctgctctggcagatttcaaccgggcttggacagaacttaccgactggctttctctgcttgatcaagttataaaatcacagagggtgatggtgggtgaccttgaggatatcaacgagatgatcatcaagcagaaggcaacaatgcaggatttggaacagaggcgtccccagttggaagaactcattaccgctgcccaaaatttgaaaaacaagaccagcaatcaagaggctagaacaatcattacggatcgaattgaaagaattcagaatcagtgggatgaagtacaagaacaccttcagaaccggaggcaacagttgaatgaaatgttaaaggattcaacacaatggctggaagctaaggaagaagctgagcaggtcttaggacaggccagagccaagcttgagtcatggaaggagggtccctatacagtagatgcaatccaaaagaaaatcacagaaaccaagcagttggccaaagacctccgccagtggcagacaaatgtagatgtggcaaatgacttggccctgaaacttctccgggattattctgcagatgataccagaaaagtccacatgataacagagaatatcaatgcctcttggagaagcattcataaaagggtgagtgagcgagaggctgctttggaagaaactcatagattactgcaacagttccccctggacctggaaaagtttcttgcctggcttacagaagctgaaacaactgccaatgtcctacaggatgctacccgtaaggaaaggctcctagaagactccaagggagtaaaagagctgatgaaacaatggcaagacctccaaggtgaaattgaagctcacacagatgtttatcacaacctggatgaaaacagccaaaaaatcctgagatccctggaaggttccgatgatgcagtcctgttacaaagacgtttggataacatgaacttcaagtggagtgaacttcggaaaaagtctctcaacattaggtcccatttggaagccagttctgaccagtggaagcgtctgcacctttctctgcaggaacttctggtgtggctacagctgaaagatgatgaattaagccggcaggcacctattggaggcgactttccagcagttcagaagcagaacgatgtacatagggccttcaagagggaattgaaaactaaagaacctgtaatcatgagtactcttgagactgtacgaatatttctgacagagcagcctttggaaggactagagaaactctaccaggagcccagagagctgcctcctgaggagagagcccagaatgtcactcggcttctacgaaagcaggctgaggaggtcaatactgagtgggaaaaattgaacctgcactccgctgactggcagagaaaaatagatgagacccttgaaagactccaggaacttcaagaggccacggatgagctggacctcaagctgcgccaagctgaggtgatcaagggatcctggcagcccgtgggcgatctcctcattgactctctccaagatcacctcgagaaagtcaaggcacttcgaggagaaattgcgcctctgaaagagaacgtgagccacgtcaatgaccttgctcgccagcttaccactttgggcattcagctctcaccgtataacctcagcactctggaagacctgaacaccagatggaagcttctgcaggtggccgtcgaggaccgagtcaggcagctgcatgaagcccacagggactttggtccagcatctcagcactttctttccacgtctgtccagggtccctgggagagagccatctcgccaaacaaagtgccctactatatcaaccacgagactcaaacaacttgctgggaccatcccaaaatgacagagctctaccagtctttagctgacctgaataatgtcagattctcagcttataggactgccatgaaactccgaagactgcagaaggccctttgcttggatctcttgagcctgtcagctgcatgtgatgccttggaccagcacaacctcaagcaaaatgaccagcccatggatatcctgcagattattaattgtttgaccactatttatgaccgcctggagcaagagcacaacaatttggtcaacgtccctctctgcgtggatatgtgtctgaactggctgctgaatgtttatgatacgggacgaacagggaggatccgtgtcctgtcttttaaaactggcatcatttccctgtgtaaagcacatttggaagacaagtacagataccttttcaagcaagtggcaagttcaacaggattttgtgaccagcgcaggctgggcctccttctgcatgattctatccaaattccaagacagttgggtgaagttgcatcctttgggggcagtaacattgagccaagtgtccggagctgcttccaatttgctaataataagccagagatcgaagcggccctcttcctagactggatgagactggaaccccagtccatggtgtggctgcccgtcctgcacagagtggctgctgcagaaactgccaagcatcaggccaaatgtaacatctgcaaagagtgtccaatcattggattcaggtacaggagtctaaagcactttaattatgacatctgccaaagctgctttttttctggtcgagttgcaaaaggccataaaatgcactatcccatggtggaatattgcactccgactacatcaggagaagatgttcgagactttgccaaggtactaaaaaacaaatttcgaaccaaaaggtattttgcgaagcatccccgaatgggctacctgccagtgcagactgtcttagagggggacaacatggaaactcccgttactctgatcaacttctggccagtagattctgcgcctgcctcgtcccctcagctttcacacgatgatactcattcacgcattgaacattatgctagcaggctagcagaaatggaaaacagcaatggatcttatctaaatgatagcatctctcctaatgagagcatagatgatgaacatttgttaatccagcattactgccaaagtttgaaccaggactcccccctgagccagcctcgtagtcctgcccagatcttgatttccttagagagtgaggaaagaggggagctagagagaatcctagcagatcttgaggaagaaaacaggaatctgcaagcagaatatgaccgtctaaagcagcagcacgaacataaaggcctgtccccactgccgtcccctcctgaaatgatgcccacctctccccagagtccccgggatgctgagctcattgctgaggccaagctactgcgtcaacacaaaggccgcctggaagccaggatgcaaatcctggaagaccacaataaacagctggagtcacagttacacaggctaaggcagctgctggagcaaccccaggcagaggccaaagtgaatggcacaacggtgtcctctccttctacctctctacagaggtccgacagcagtcagcctatgctgctccgagtggttggcagtcaaacttcggactccatgggtgaggaagatcttctcagtcctccccaggacacaagcacagggttagaggaggtgatggagcaactcaacaactccttccctagttcaagaggaagaaatacccctggaaagccaatgagagaggacacaatgtaggaagtcttttccacatggcagatgatttgggcagagcgatggagtccttagtatcagtcatgacagatgaagaaggagcagaataaatgttttacaactcctgattcccgcatggtttttataatattcatacaacaaagaggattagacagtaagagtttacaagaaataaatctatatttttgtgaagggtagtggtattatactgtagatttcagtagtttctaagtctgttattgttttgttaacaatggcaggttttacacgtctatgcaattgtacaaaaaagttataagaaaactacatgtaaaatcttgatagctaaataacttgccatttctttatatggaacgcattttgggttgtttaaaaatttataacagttataaagaaagattgtaaactaaagtgtgctttataaaaaaaagttgtttataaaaacccctaaaaacaaaacaaacacacacacacacacatacacacacacacacaaaactttgaggcagcgcattgttttgcatccttttggcgtgatatccatatgaaattcatggctttttctttttttgcatattaaagataagacttcctctaccaccacaccaaatgactactacacactgctcatttgagaactgtcagctgagtggggcaggcttgagttttcatttcatatatctatatgtctataagtatataaatactatagttatatagataaagagatacgaatttctatagactgactttttccattttttaaatgttcatgtcacatcctaatagaaagaaattacttctagtcagtcatccaggcttacctgcttggtctagaatggatttttcccggagccggaagccaggaggaaactacaccacactaaaacattgtctacagctccagatgtttctcattttaaacaactttccactgacaacgaaagtaaagtaaagtattggatttttttaaagggaacatgtgaatgaatacacaggacttattatatcagagtgagtaatcggttggttggttgattgattgattgattgatacattcagcttcctgctgctagcaatgccacgatttagatttaatgatgcttcagtggaaatcaatcagaaggtattctgaccttgtgaacatcagaaggtattttttaactcccaagcagtagcaggacgatgatagggctggagggctatggattcccagcccatccctgtgaaggagtaggccactctttaagtgaaggattggatgattgttcataatacataaagttctctgtaattacaactaaattattatgccctcttctcacagtcaaaaggaactgggtggtttggtttttgttgcttttttagatttattgtcccatgtgggatgagtttttaaatgccacaagacataatttaaaataaataaactttgggaaaaggtgtaaaacagtagccccatcacatttgtgatactgacaggtatcaacccagaagcccatgaactgtgtttccatcctttgcatttctctgcgagtagttccacacaggtttgtaagtaagtaagaaagaaggcaaattgattcaaatgttacaaaaaaacccttcttggtggattagacaggttaaatatataaacaaacaaacaaaaattgctcaaaaaagaggagaaaagctcaagaggaaaagctaaggactggtaggaaaaagctttactctttcatgccattttatttctttttgatttttaaatcattcattcaatagataccaccgtgtgacctataattttgcaaatctgttacctctgacatcaagtgtaattagcttttggagagtgggctgacatcaagtgtaattagcttttggagagtgggttttgtccattattaataattaattaattaacatcaaacacggcttctcatgctatttctacctcactttggttttggggtgttcctgataattgtgcacacctgagttcacagcttcaccacttgtccattgcgttattttctttttcctttataattctttctttttccttcataattttcaaaagaaaacccaaagctctaaggtaacaaattaccaaattacatgaagatttggtttttgtcttgcatttttttcctttatgtgacgctggaccttttctttacccaaggatttttaaaactcagatttaaaacaaggggttactttacatcctactaagaagtttaagtaagtaagtttcattctaaaatcagaggtaaatagagtgcataaataattttgttttaatctttttgtttttcttttagacacattagctctggagtgagtctgtcataatatttgaacaaaaattgagagctttattgctgcattttaagcataattaatttggacattatttcgtgttgtgttctttataaccaccaagtattaaactgtaaatcataatgtaactgaagcataaacatcacatggcatgttttgtcattgttttcaggtactgagttcttacttgagtatcataatatattgtgttttaacaccaacactgtaacatttacgaattatttttttaaacttcagttttactgcattttcacaacatatcagacttcaccaaatatatgccttactattgtattatagtactgctttactgtgtatctcaataaagcacgcagttatgttac

SEQ ID NO: 17 - protein, 1225 aa, Homo sapiens
MPSSLMLEVPALADFNRAWTELTDWLSLLDQVIKSQRVMVGDLEDINEMIIKQKATMQDLEQRRPQLEELITAAQNLKNKTSNQEARTIITDRIERIQNQWDEVQEHLQNRRQQLNEMLKDSTQWLEAKEEAEQVLGQARAKLESWKEGPYTVDAIQKKITETKQLAKDLRQWQTNVDVANDLALKLLRDYSADDTRKVHMITENINASWRSIHKRVSEREAALEETHRLLQQFPLDLEKFLAWLTEAETTANVLQDATRKERLLEDSKGVKELMKQWQDLQGEIEAHTDVYHNLDENSQKILRSLEGSDDAVLLQRRLDNMNFKWSELRKKSLNIRSHLEASSDQWKRLHLSLQELLVWLQLKDDELSRQAPIGGDFPAVQKQNDVHRAFKRELKTKEPVIMSTLETVRIFLTEQPLEGLEKLYQEPRELPPEERAQNVTRLLRKQAEEVNTEWEKLNLHSADWQRKIDETLERLQELQEATDELDLKLRQAEVIKGSWQPVGDLLIDSLQDHLEKVKALRGEIAPLKENVSHVNDLARQLTTLGIQLSPYNLSTLEDLNTRWKLLQVAVEDRVRQLHEAHRDFGPASQHFLSTSVQGPWERAISPNKVPYYINHETQTTCWDHPKMTELYQSLADLNNVRFSAYRTAMKLRRLQKALCLDLLSLSAACDALDQHNLKQNDQPMDILQIINCLTTIYDRLEQEHNNLVNVPLCVDMCLNWLLNVYDTGRTGRIRVLSFKTGIISLCKAHLEDKYRYLFKQVASSTGFCDQRRLGLLLHDSIQIPRQLGEVASFGGSNIEPSVRSCFQFANNKPEIEAALFLDWMRLEPQSMVWLPVLHRVAAAETAKHQAKCNICKECPIIGFRYRSLKHFNYDICQSCFFSGRVAKGHKMHYPMVEYCTPTTSGEDVRDFAKVLKNKFRTKRYFAKHPRMGYLPVQTVLEGDNMETPVTLINFWPVDSAPASSPQLSHDDTHSRIEHYASRLAEMENSNGSYLNDSISPNESIDDEHLLIQHYCQSLNQDSPLSQPRSPAQILISLESEERGELERILADLEEENRNLQAEYDRLKQQHEHKGLSPLPSPPEMMPTSPQSPRDAELIAEAKLLRQHKGRLEARMQILEDHNKQLESQLHRLRQLLEQPQAEAKVNGTTVSSPSTSLQRSDSSQPMLLRVVGSQTSDSMGEEDLLSPPQDTSTGLEEVMEQLNNSFPSSRGRNTPGKPMREDTM

SEQ ID NO: 18 - DNA, 5623 bp, Homo sapiens
gggttttctcaggattgctatgcaacaggatcagtgctgtagtgcccggttcaagctgaaaatgttacacaggaagacataccatgtaaaggacctccaaggtgaaattgaagctcacacagatgtttatcacaacctggatgaaaacagccaaaaaatcctgagatccctggaaggttccgatgatgcagtcctgttacaaagacgtttggataacatgaacttcaagtggagtgaacttcggaaaaagtctctcaacattaggtcccatttggaagccagttctgaccagtggaagcgtctgcacctttctctgcaggaacttctggtgtggctacagctgaaagatgatgaattaagccggcaggcacctattggaggcgactttccagcagttcagaagcagaacgatgtacatagggccttcaagagggaattgaaaactaaagaacctgtaatcatgagtactcttgagactgtacgaatatttctgacagagcagcctttggaaggactagagaaactctaccaggagcccagagagctgcctcctgaggagagagcccagaatgtcactcggcttctacgaaagcaggctgaggaggtcaatactgagtgggaaaaattgaacctgcactccgctgactggcagagaaaaatagatgagacccttgaaagactccaggaacttcaagaggccacggatgagctggacctcaagctgcgccaagctgaggtgatcaagggatcctggcagcccgtgggcgatctcctcattgactctctccaagatcacctcgagaaagtcaaggcacttcgaggagaaattgcgcctctgaaagagaacgtgagccacgtcaatgaccttgctcgccagcttaccactttgggcattcagctctcaccgtataacctcagcactctggaagacctgaacaccagatggaagcttctgcaggtggccgtcgaggaccgagtcaggcagctgcatgaagcccacagggactttggtccagcatctcagcactttctttccacgtctgtccagggtccctgggagagagccatctcgccaaacaaagtgccctactatatcaaccacgagactcaaacaacttgctgggaccatcccaaaatgacagagctctaccagtctttagctgacctgaataatgtcagattctcagcttataggactgccatgaaactccgaagactgcagaaggccctttgcttggatctcttgagcctgtcagctgcatgtgatgccttggaccagcacaacctcaagcaaaatgaccagcccatggatatcctgcagattattaattgtttgaccactatttatgaccgcctggagcaagagcacaacaatttggtcaacgtccctctctgcgtggatatgtgtctgaactggctgctgaatgtttatgatacgggacgaacagggaggatccgtgtcctgtcttttaaaactggcatcatttccctgtgtaaagcacatttggaagacaagtacagataccttttcaagcaagtggcaagttcaacaggattttgtgaccagcgcaggctgggcctccttctgcatgattctatccaaattccaagacagttgggtgaagttgcatcctttgggggcagtaacattgagccaagtgtccggagctgcttccaatttgctaataataagccagagatcgaagcggccctcttcctagactggatgagactggaaccccagtccatggtgtggctgcccgtcctgcacagagtggctgctgcagaaactgccaagcatcaggccaaatgtaacatctgcaaagagtgtccaatcattggattcaggtacaggagtctaaagcactttaattatgacatctgccaaagctgctttttttctggtcgagttgcaaaaggccataaaatgcactatcccatggtggaatattgcactccgactacatcaggagaagatgttcgagactttgccaaggtactaaaaaacaaatttcgaaccaaaaggtattttgcgaagcatccccgaatgggctacctgccagtgcagactgtcttagagggggacaacatggaaactcccgttactctgatcaacttctggccagtagattctgcgcctgcctcgtcccctcagctttcacacgatgatactcattcacgcattgaacattatgctagcaggctagcagaaatggaaaacagcaatggatcttatctaaatgatagcatctctcctaatgagagcatagatgatgaacatttgttaatccagcattactgccaaagtttgaaccaggactcccccctgagccagcctcgtagtcctgcccagatcttgatttccttagagagtgaggaaagaggggagctagagagaatcctagcagatcttgaggaagaaaacaggaatctgcaagcagaatatgaccgtctaaagcagcagcacgaacataaaggcctgtccccactgccgtcccctcctgaaatgatgcccacctctccccagagtccccgggatgctgagctcattgctgaggccaagctactgcgtcaacacaaaggccgcctggaagccaggatgcaaatcctggaagaccacaataaacagctggagtcacagttacacaggctaaggcagctgctggagcaaccccaggcagaggccaaagtgaatggcacaacggtgtcctctccttctacctctctacagaggtccgacagcagtcagcctatgctgctccgagtggttggcagtcaaacttcggactccatgggtgaggaagatcttctcagtcctccccaggacacaagcacagggttagaggaggtgatggagcaactcaacaactccttccctagttcaagaggaagaaatacccctggaaagccaatgagagaggacacaatgtaggaagtcttttccacatggcagatgatttgggcagagcgatggagtccttagtatcagtcatgacagatgaagaaggagcagaataaatgttttacaactcctgattcccgcatggtttttataatattcatacaacaaagaggattagacagtaagagtttacaagaaataaatctatatttttgtgaagggtagtggtattatactgtagatttcagtagtttctaagtctgttattgttttgttaacaatggcaggttttacacgtctatgcaattgtacaaaaaagttataagaaaactacatgtaaaatcttgatagctaaataacttgccatttctttatatggaacgcattttgggttgtttaaaaatttataacagttataaagaaagattgtaaactaaagtgtgctttataaaaaaaagttgtttataaaaacccctaaaaacaaaacaaacacacacacacacacatacacacacacacacaaaactttgaggcagcgcattgttttgcatccttttggcgtgatatccatatgaaattcatggctttttctttttttgcatattaaagataagacttcctctaccaccacaccaaatgactactacacactgctcatttgagaactgtcagctgagtggggcaggcttgagttttcatttcatatatctatatgtctataagtatataaatactatagttatatagataaagagatacgaatttctatagactgactttttccattttttaaatgttcatgtcacatcctaatagaaagaaattacttctagtcagtcatccaggcttacctgcttggtctagaatggatttttcccggagccggaagccaggaggaaactacaccacactaaaacattgtctacagctccagatgtttctcattttaaacaactttccactgacaacgaaagtaaagtaaagtattggatttttttaaagggaacatgtgaatgaatacacaggacttattatatcagagtgagtaatcggttggttggttgattgattgattgattgatacattcagcttcctgctgctagcaatgccacgatttagatttaatgatgcttcagtggaaatcaatcagaaggtattctgaccttgtgaacatcagaaggtattttttaactcccaagcagtagcaggacgatgatagggctggagggctatggattcccagcccatccctgtgaaggagtaggccactctttaagtgaaggattggatgattgttcataatacataaagttctctgtaattacaactaaattattatgccctcttctcacagtcaaaaggaactgggtggtttggtttttgttgcttttttagatttattgtcccatgtgggatgagtttttaaatgccacaagacataatttaaaataaataaactttgggaaaaggtgtaaaacagtagccccatcacatttgtgatactgacaggtatcaacccagaagcccatgaactgtgtttccatcctttgcatttctctgcgagtagttccacacaggtttgtaagtaagtaagaaagaaggcaaattgattcaaatgttacaaaaaaacccttcttggtggattagacaggttaaatatataaacaaacaaacaaaaattgctcaaaaaagaggagaaaagctcaagaggaaaagctaaggactggtaggaaaaagctttactctttcatgccattttatttctttttgatttttaaatcattcattcaatagataccaccgtgtgacctataattttgcaaatctgttacctctgacatcaagtgtaattagcttttggagagtgggctgacatcaagtgtaattagcttttggagagtgggttttgtccattattaataattaattaattaacatcaaacacggcttctcatgctatttctacctcactttggttttggggtgttcctgataattgtgcacacctgagttcacagcttcaccacttgtccattgcgttattttctttttcctttataattctttctttttccttcataattttcaaaagaaaacccaaagctctaaggtaacaaattaccaaattacatgaagatttggtttttgtcttgcatttttttcctttatgtgacgctggaccttttctttacccaaggatttttaaaactcagatttaaaacaaggggttactttacatcctactaagaagtttaagtaagtaagtttcattctaaaatcagaggtaaatagagtgcataaataattttgttttaatctttttgtttttcttttagacacattagctctggagtgagtctgtcataatatttgaacaaaaattgagagctttattgctgcattttaagcataattaatttggacattatttcgtgttgtgttctttataaccaccaagtattaaactgtaaatcataatgtaactgaagcataaacatcacatggcatgttttgtcattgttttcaggtactgagttcttacttgagtatcataatatattgtgttttaacaccaacactgtaacatttacgaattatttttttaaacttcagttttactgcattttcacaacatatcagacttcaccaaatatatgccttactattgtattatagtactgctttactgtgtatctcaataaagcacgcagttatgttac

SEQ ID NO: 19 - protein, 956 aa, Homo sapiens
MLHRKTYHVKDLQGEIEAHTDVYHNLDENSQKILRSLEGSDDAVLLQRRLDNMNFKWSELRKKSLNIRSHLEASSDQWKRLHLSLQELLVWLQLKDDELSRQAPIGGDFPAVQKQNDVHRAFKRELKTKEPVIMSTLETVRIFLTEQPLEGLEKLYQEPRELPPEERAQNVTRLLRKQAEEVNTEWEKLNLHSADWQRKIDETLERLQELQEATDELDLKLRQAEVIKGSWQPVGDLLIDSLQDHLEKVKALRGEIAPLKENVSHVNDLARQLTTLGIQLSPYNLSTLEDLNTRWKLLQVAVEDRVRQLHEAHRDFGPASQHFLSTSVQGPWERAISPNKVPYYINHETQTTCWDHPKMTELYQSLADLNNVRFSAYRTAMKLRRLQKALCLDLLSLSAACDALDQHNLKQNDQPMDILQIINCLTTIYDRLEQEHNNLVNVPLCVDMCLNWLLNVYDTGRTGRIRVLSFKTGIISLCKAHLEDKYRYLFKQVASSTGFCDQRRLGLLLHDSIQIPRQLGEVASFGGSNIEPSVRSCFQFANNKPEIEAALFLDWMRLEPQSMVWLPVLHRVAAAETAKHQAKCNICKECPIIGFRYRSLKHFNYDICQSCFFSGRVAKGHKMHYPMVEYCTPTTSGEDVRDFAKVLKNKFRTKRYFAKHPRMGYLPVQTVLEGDNMETPVTLINFWPVDSAPASSPQLSHDDTHSRIEHYASRLAEMENSNGSYLNDSISPNESIDDEHLLIQHYCQSLNQDSPLSQPRSPAQILISLESEERGELERILADLEEENRNLQAEYDRLKQQHEHKGLSPLPSPPEMMPTSPQSPRDAELIAEAKLLRQHKGRLEARMQILEDHNKQLESQLHRLRQLLEQPQAEAKVNGTTVSSPSTSLQRSDSSQPMLLRVVGSQTSDSMGEEDLLSPPQDTSTGLEEVMEQLNNSFPSSRGRNTPGKPMREDTM

SEQ ID NO: 20 - DNA, 4623 bp, Homo sapiens
actttcggggagcccggcggctctgggaagctcactcctccactcgtacccacactcgaccgcggagcccttgcagccatgagggaacagctcaaaggccacgagactcaaacaacttgctgggaccatcccaaaatgacagagctctaccagtctttagctgacctgaataatgtcagattctcagcttataggactgccatgaaactccgaagactgcagaaggccctttgcttggatctcttgagcctgtcagctgcatgtgatgccttggaccagcacaacctcaagcaaaatgaccagcccatggatatcctgcagattattaattgtttgaccactatttatgaccgcctggagcaagagcacaacaatttggtcaacgtccctctctgcgtggatatgtgtctgaactggctgctgaatgtttatgatacgggacgaacagggaggatccgtgtcctgtcttttaaaactggcatcatttccctgtgtaaagcacatttggaagacaagtacagataccttttcaagcaagtggcaagttcaacaggattttgtgaccagcgcaggctgggcctccttctgcatgattctatccaaattccaagacagttgggtgaagttgcatcctttgggggcagtaacattgagccaagtgtccggagctgcttccaatttgctaataataagccagagatcgaagcggccctcttcctagactggatgagactggaaccccagtccatggtgtggctgcccgtcctgcacagagtggctgctgcagaaactgccaagcatcaggccaaatgtaacatctgcaaagagtgtccaatcattggattcaggtacaggagtctaaagcactttaattatgacatctgccaaagctgctttttttctggtcgagttgcaaaaggccataaaatgcactatcccatggtggaatattgcactccgactacatcaggagaagatgttcgagactttgccaaggtactaaaaaacaaatttcgaaccaaaaggtattttgcgaagcatccccgaatgggctacctgccagtgcagactgtcttagagggggacaacatggaaactcccgttactctgatcaacttctggccagtagattctgcgcctgcctcgtcccctcagctttcacacgatgatactcattcacgcattgaacattatgctagcaggctagcagaaatggaaaacagcaatggatcttatctaaatgatagcatctctcctaatgagagcatagatgatgaacatttgttaatccagcattactgccaaagtttgaaccaggactcccccctgagccagcctcgtagtcctgcccagatcttgatttccttagagagtgaggaaagaggggagctagagagaatcctagcagatcttgaggaagaaaacaggaatctgcaagcagaatatgaccgtctaaagcagcagcacgaacataaaggcctgtccccactgccgtcccctcctgaaatgatgcccacctctccccagagtccccgggatgctgagctcattgctgaggccaagctactgcgtcaacacaaaggccgcctggaagccaggatgcaaatcctggaagaccacaataaacagctggagtcacagttacacaggctaaggcagctgctggagcaaccccaggcagaggccaaagtgaatggcacaacggtgtcctctccttctacctctctacagaggtccgacagcagtcagcctatgctgctccgagtggttggcagtcaaacttcggactccatgggtgaggaagatcttctcagtcctccccaggacacaagcacagggttagaggaggtgatggagcaactcaacaactccttccctagttcaagaggaagaaatacccctggaaagccaatgagagaggacacaatgtaggaagtcttttccacatggcagatgatttgggcagagcgatggagtccttagtatcagtcatgacagatgaagaaggagcagaataaatgttttacaactcctgattcccgcatggtttttataatattcatacaacaaagaggattagacagtaagagtttacaagaaataaatctatatttttgtgaagggtagtggtattatactgtagatttcagtagtttctaagtctgttattgttttgttaacaatggcaggttttacacgtctatgcaattgtacaaaaaagttataagaaaactacatgtaaaatcttgatagctaaataacttgccatttctttatatggaacgcattttgggttgtttaaaaatttataacagttataaagaaagattgtaaactaaagtgtgctttataaaaaaaagttgtttataaaaacccctaaaaacaaaacaaacacacacacacacacatacacacacacacacaaaactttgaggcagcgcattgttttgcatccttttggcgtgatatccatatgaaattcatggctttttctttttttgcatattaaagataagacttcctctaccaccacaccaaatgactactacacactgctcatttgagaactgtcagctgagtggggcaggcttgagttttcatttcatatatctatatgtctataagtatataaatactatagttatatagataaagagatacgaatttctatagactgactttttccattttttaaatgttcatgtcacatcctaatagaaagaaattacttctagtcagtcatccaggcttacctgcttggtctagaatggatttttcccggagccggaagccaggaggaaactacaccacactaaaacattgtctacagctccagatgtttctcattttaaacaactttccactgacaacgaaagtaaagtaaagtattggatttttttaaagggaacatgtgaatgaatacacaggacttattatatcagagtgagtaatcggttggttggttgattgattgattgattgatacattcagcttcctgctgctagcaatgccacgatttagatttaatgatgcttcagtggaaatcaatcagaaggtattctgaccttgtgaacatcagaaggtattttttaactcccaagcagtagcaggacgatgatagggctggagggctatggattcccagcccatccctgtgaaggagtaggccactctttaagtgaaggattggatgattgttcataatacataaagttctctgtaattacaactaaattattatgccctcttctcacagtcaaaaggaactgggtggtttggtttttgttgcttttttagatttattgtcccatgtgggatgagtttttaaatgccacaagacataatttaaaataaataaactttgggaaaaggtgtaaaacagtagccccatcacatttgtgatactgacaggtatcaacccagaagcccatgaactgtgtttccatcctttgcatttctctgcgagtagttccacacaggtttgtaagtaagtaagaaagaaggcaaattgattcaaatgttacaaaaaaacccttcttggtggattagacaggttaaatatataaacaaacaaacaaaaattgctcaaaaaagaggagaaaagctcaagaggaaaagctaaggactggtaggaaaaagctttactctttcatgccattttatttctttttgatttttaaatcattcattcaatagataccaccgtgtgacctataattttgcaaatctgttacctctgacatcaagtgtaattagcttttggagagtgggctgacatcaagtgtaattagcttttggagagtgggttttgtccattattaataattaattaattaacatcaaacacggcttctcatgctatttctacctcactttggttttggggtgttcctgataattgtgcacacctgagttcacagcttcaccacttgtccattgcgttattttctttttcctttataattctttctttttccttcataattttcaaaagaaaacccaaagctctaaggtaacaaattaccaaattacatgaagatttggtttttgtcttgcatttttttcctttatgtgacgctggaccttttctttacccaaggatttttaaaactcagatttaaaacaaggggttactttacatcctactaagaagtttaagtaagtaagtttcattctaaaatcagaggtaaatagagtgcataaataattttgttttaatctttttgtttttcttttagacacattagctctggagtgagtctgtcataatatttgaacaaaaattgagagctttattgctgcattttaagcataattaatttggacattatttcgtgttgtgttctttataaccaccaagtattaaactgtaaatcataatgtaactgaagcataaacatcacatggcatgttttgtcattgttttcaggtactgagttcttacttgagtatcataatatattgtgttttaacaccaacactgtaacatttacgaattatttttttaaacttcagttttactgcattttcacaacatatcagacttcaccaaatatatgccttactattgtattatagtactgctttactgtgtatctcaataaagcacgcagttatgttac

SEQ ID NO: 21 - protein, 617 aa, Homo sapiens
MREQLKGHETQTTCWDHPKMTELYQSLADLNNVRFSAYRTAMKLRRLQKALCLDLLSLSAACDALDQHNLKQNDQPMDILQIINCLTTIYDRLEQEHNNLVNVPLCVDMCLNWLLNVYDTGRTGRIRVLSFKTGIISLCKAHLEDKYRYLFKQVASSTGFCDQRRLGLLLHDSIQIPRQLGEVASFGGSNIEPSVRSCFQFANNKPEIEAALFLDWMRLEPQSMVWLPVLHRVAAAETAKHQAKCNICKECPIIGFRYRSLKHFNYDICQSCFFSGRVAKGHKMHYPMVEYCTPTTSGEDVRDFAKVLKNKFRTKRYFAKHPRMGYLPVQTVLEGDNMETPVTLINFWPVDSAPASSPQLSHDDTHSRIEHYASRLAEMENSNGSYLNDSISPNESIDDEHLLIQHYCQSLNQDSPLSQPRSPAQILISLESEERGELERILADLEEENRNLQAEYDRLKQQHEHKGLSPLPSPPEMMPTSPQSPRDAELIAEAKLLRQHKGRLEARMQILEDHNKQLESQLHRLRQLLEQPQAEAKVNGTTVSSPSTSLQRSDSSQPMLLRVVGSQTSDSMGEEDLLSPPQDTSTGLEEVMEQLNNSFPSSRGRNTPGKPMREDTM

SEQ ID NO: 22 - DNA, 4591 bp, Homo sapiens
actttcggggagcccggcggctctgggaagctcactcctccactcgtacccacactcgaccgcggagcccttgcagccatgagggaacagctcaaaggccacgagactcaaacaacttgctgggaccatcccaaaatgacagagctctaccagtctttagctgacctgaataatgtcagattctcagcttataggactgccatgaaactccgaagactgcagaaggccctttgcttggatctcttgagcctgtcagctgcatgtgatgccttggaccagcacaacctcaagcaaaatgaccagcccatggatatcctgcagattattaattgtttgaccactatttatgaccgcctggagcaagagcacaacaatttggtcaacgtccctctctgcgtggatatgtgtctgaactggctgctgaatgtttatgatacgggacgaacagggaggatccgtgtcctgtcttttaaaactggcatcatttccctgtgtaaagcacatttggaagacaagtacagataccttttcaagcaagtggcaagttcaacaggattttgtgaccagcgcaggctgggcctccttctgcatgattctatccaaattccaagacagttgggtgaagttgcatcctttgggggcagtaacattgagccaagtgtccggagctgcttccaatttgctaataataagccagagatcgaagcggccctcttcctagactggatgagactggaaccccagtccatggtgtggctgcccgtcctgcacagagtggctgctgcagaaactgccaagcatcaggccaaatgtaacatctgcaaagagtgtccaatcattggattcaggtacaggagtctaaagcactttaattatgacatctgccaaagctgctttttttctggtcgagttgcaaaaggccataaaatgcactatcccatggtggaatattgcactccgactacatcaggagaagatgttcgagactttgccaaggtactaaaaaacaaatttcgaaccaaaaggtattttgcgaagcatccccgaatgggctacctgccagtgcagactgtcttagagggggacaacatggaaactcccgttactctgatcaacttctggccagtagattctgcgcctgcctcgtcccctcagctttcacacgatgatactcattcacgcattgaacattatgctagcaggctagcagaaatggaaaacagcaatggatcttatctaaatgatagcatctctcctaatgagagcatagatgatgaacatttgttaatccagcattactgccaaagtttgaaccaggactcccccctgagccagcctcgtagtcctgcccagatcttgatttccttagagagtgaggaaagaggggagctagagagaatcctagcagatcttgaggaagaaaacaggaatctgcaagcagaatatgaccgtctaaagcagcagcacgaacataaaggcctgtccccactgccgtcccctcctgaaatgatgcccacctctccccagagtccccgggatgctgagctcattgctgaggccaagctactgcgtcaacacaaaggccgcctggaagccaggatgcaaatcctggaagaccacaataaacagctggagtcacagttacacaggctaaggcagctgctggagcaaccccaggcagaggccaaagtgaatggcacaacggtgtcctctccttctacctctctacagaggtccgacagcagtcagcctatgctgctccgagtggttggcagtcaaacttcggactccatgggtgaggaagatcttctcagtcctccccaggacacaagcacagggttagaggaggtgatggagcaactcaacaactccttccctagttcaagaggacacaatgtaggaagtcttttccacatggcagatgatttgggcagagcgatggagtccttagtatcagtcatgacagatgaagaaggagcagaataaatgttttacaactcctgattcccgcatggtttttataatattcatacaacaaagaggattagacagtaagagtttacaagaaataaatctatatttttgtgaagggtagtggtattatactgtagatttcagtagtttctaagtctgttattgttttgttaacaatggcaggttttacacgtctatgcaattgtacaaaaaagttataagaaaactacatgtaaaatcttgatagctaaataacttgccatttctttatatggaacgcattttgggttgtttaaaaatttataacagttataaagaaagattgtaaactaaagtgtgctttataaaaaaaagttgtttataaaaacccctaaaaacaaaacaaacacacacacacacacatacacacacacacacaaaactttgaggcagcgcattgttttgcatccttttggcgtgatatccatatgaaattcatggctttttctttttttgcatattaaagataagacttcctctaccaccacaccaaatgactactacacactgctcatttgagaactgtcagctgagtggggcaggcttgagttttcatttcatatatctatatgtctataagtatataaatactatagttatatagataaagagatacgaatttctatagactgactttttccattttttaaatgttcatgtcacatcctaatagaaagaaattacttctagtcagtcatccaggcttacctgcttggtctagaatggatttttcccggagccggaagccaggaggaaactacaccacactaaaacattgtctacagctccagatgtttctcattttaaacaactttccactgacaacgaaagtaaagtaaagtattggatttttttaaagggaacatgtgaatgaatacacaggacttattatatcagagtgagtaatcggttggttggttgattgattgattgattgatacattcagcttcctgctgctagcaatgccacgatttagatttaatgatgcttcagtggaaatcaatcagaaggtattctgaccttgtgaacatcagaaggtattttttaactcccaagcagtagcaggacgatgatagggctggagggctatggattcccagcccatccctgtgaaggagtaggccactctttaagtgaaggattggatgattgttcataatacataaagttctctgtaattacaactaaattattatgccctcttctcacagtcaaaaggaactgggtggtttggtttttgttgcttttttagatttattgtcccatgtgggatgagtttttaaatgccacaagacataatttaaaataaataaactttgggaaaaggtgtaaaacagtagccccatcacatttgtgatactgacaggtatcaacccagaagcccatgaactgtgtttccatcctttgcatttctctgcgagtagttccacacaggtttgtaagtaagtaagaaagaaggcaaattgattcaaatgttacaaaaaaacccttcttggtggattagacaggttaaatatataaacaaacaaacaaaaattgctcaaaaaagaggagaaaagctcaagaggaaaagctaaggactggtaggaaaaagctttactctttcatgccattttatttctttttgatttttaaatcattcattcaatagataccaccgtgtgacctataattttgcaaatctgttacctctgacatcaagtgtaattagcttttggagagtgggctgacatcaagtgtaattagcttttggagagtgggttttgtccattattaataattaattaattaacatcaaacacggcttctcatgctatttctacctcactttggttttggggtgttcctgataattgtgcacacctgagttcacagcttcaccacttgtccattgcgttattttctttttcctttataattctttctttttccttcataattttcaaaagaaaacccaaagctctaaggtaacaaattaccaaattacatgaagatttggtttttgtcttgcatttttttcctttatgtgacgctggaccttttctttacccaaggatttttaaaactcagatttaaaacaaggggttactttacatcctactaagaagtttaagtaagtaagtttcattctaaaatcagaggtaaatagagtgcataaataattttgttttaatctttttgtttttcttttagacacattagctctggagtgagtctgtcataatatttgaacaaaaattgagagctttattgctgcattttaagcataattaatttggacattatttcgtgttgtgttctttataaccaccaagtattaaactgtaaatcataatgtaactgaagcataaacatcacatggcatgttttgtcattgttttcaggtactgagttcttacttgagtatcataatatattgtgttttaacaccaacactgtaacatttacgaattatttttttaaacttcagttttactgcattttcacaacatatcagacttcaccaaatatatgccttactattgtattatagtactgctttactgtgtatctcaataaagcacgcagttatgttac

SEQ ID NO: 23 - protein, 635 aa, Homo sapiens
MREQLKGHETQTTCWDHPKMTELYQSLADLNNVRFSAYRTAMKLRRLQKALCLDLLSLSAACDALDQHNLKQNDQPMDILQIINCLTTIYDRLEQEHNNLVNVPLCVDMCLNWLLNVYDTGRTGRIRVLSFKTGIISLCKAHLEDKYRYLFKQVASSTGFCDQRRLGLLLHDSIQIPRQLGEVASFGGSNIEPSVRSCFQFANNKPEIEAALFLDWMRLEPQSMVWLPVLHRVAAAETAKHQAKCNICKECPIIGFRYRSLKHFNYDICQSCFFSGRVAKGHKMHYPMVEYCTPTTSGEDVRDFAKVLKNKFRTKRYFAKHPRMGYLPVQTVLEGDNMETPVTLINFWPVDSAPASSPQLSHDDTHSRIEHYASRLAEMENSNGSYLNDSISPNESIDDEHLLIQHYCQSLNQDSPLSQPRSPAQILISLESEERGELERILADLEEENRNLQAEYDRLKQQHEHKGLSPLPSPPEMMPTSPQSPRDAELIAEAKLLRQHKGRLEARMQILEDHNKQLESQLHRLRQLLEQPQAEAKVNGTTVSSPSTSLQRSDSSQPMLLRVVGSQTSDSMGEEDLLSPPQDTSTGLEEVMEQLNNSFPSSRGHNVGSLFHMADDLGRAMESLVSVMTDEEGAE

SEQ ID NO: 24 - DNA, 4584 bp, Homo sapiens
actttcggggagcccggcggctctgggaagctcactcctccactcgtacccacactcgaccgcggagcccttgcagccatgagggaacagctcaaaggccacgagactcaaacaacttgctgggaccatcccaaaatgacagagctctaccagtctttagctgacctgaataatgtcagattctcagcttataggactgccatgaaactccgaagactgcagaaggccctttgcttggatctcttgagcctgtcagctgcatgtgatgccttggaccagcacaacctcaagcaaaatgaccagcccatggatatcctgcagattattaattgtttgaccactatttatgaccgcctggagcaagagcacaacaatttggtcaacgtccctctctgcgtggatatgtgtctgaactggctgctgaatgtttatgatacgggacgaacagggaggatccgtgtcctgtcttttaaaactggcatcatttccctgtgtaaagcacatttggaagacaagtacagataccttttcaagcaagtggcaagttcaacaggattttgtgaccagcgcaggctgggcctccttctgcatgattctatccaaattccaagacagttgggtgaagttgcatcctttgggggcagtaacattgagccaagtgtccggagctgcttccaatttgctaataataagccagagatcgaagcggccctcttcctagactggatgagactggaaccccagtccatggtgtggctgcccgtcctgcacagagtggctgctgcagaaactgccaagcatcaggccaaatgtaacatctgcaaagagtgtccaatcattggattcaggtacaggagtctaaagcactttaattatgacatctgccaaagctgctttttttctggtcgagttgcaaaaggccataaaatgcactatcccatggtggaatattgcactccgactacatcaggagaagatgttcgagactttgccaaggtactaaaaaacaaatttcgaaccaaaaggtattttgcgaagcatccccgaatgggctacctgccagtgcagactgtcttagagggggacaacatggaaacgcctgcctcgtcccctcagctttcacacgatgatactcattcacgcattgaacattatgctagcaggctagcagaaatggaaaacagcaatggatcttatctaaatgatagcatctctcctaatgagagcatagatgatgaacatttgttaatccagcattactgccaaagtttgaaccaggactcccccctgagccagcctcgtagtcctgcccagatcttgatttccttagagagtgaggaaagaggggagctagagagaatcctagcagatcttgaggaagaaaacaggaatctgcaagcagaatatgaccgtctaaagcagcagcacgaacataaaggcctgtccccactgccgtcccctcctgaaatgatgcccacctctccccagagtccccgggatgctgagctcattgctgaggccaagctactgcgtcaacacaaaggccgcctggaagccaggatgcaaatcctggaagaccacaataaacagctggagtcacagttacacaggctaaggcagctgctggagcaaccccaggcagaggccaaagtgaatggcacaacggtgtcctctccttctacctctctacagaggtccgacagcagtcagcctatgctgctccgagtggttggcagtcaaacttcggactccatgggtgaggaagatcttctcagtcctccccaggacacaagcacagggttagaggaggtgatggagcaactcaacaactccttccctagttcaagaggaagaaatacccctggaaagccaatgagagaggacacaatgtaggaagtcttttccacatggcagatgatttgggcagagcgatggagtccttagtatcagtcatgacagatgaagaaggagcagaataaatgttttacaactcctgattcccgcatggtttttataatattcatacaacaaagaggattagacagtaagagtttacaagaaataaatctatatttttgtgaagggtagtggtattatactgtagatttcagtagtttctaagtctgttattgttttgttaacaatggcaggttttacacgtctatgcaattgtacaaaaaagttataagaaaactacatgtaaaatcttgatagctaaataacttgccatttctttatatggaacgcattttgggttgtttaaaaatttataacagttataaagaaagattgtaaactaaagtgtgctttataaaaaaaagttgtttataaaaacccctaaaaacaaaacaaacacacacacacacacatacacacacacacacaaaactttgaggcagcgcattgttttgcatccttttggcgtgatatccatatgaaattcatggctttttctttttttgcatattaaagataagacttcctctaccaccacaccaaatgactactacacactgctcatttgagaactgtcagctgagtggggcaggcttgagttttcatttcatatatctatatgtctataagtatataaatactatagttatatagataaagagatacgaatttctatagactgactttttccattttttaaatgttcatgtcacatcctaatagaaagaaattacttctagtcagtcatccaggcttacctgcttggtctagaatggatttttcccggagccggaagccaggaggaaactacaccacactaaaacattgtctacagctccagatgtttctcattttaaacaactttccactgacaacgaaagtaaagtaaagtattggatttttttaaagggaacatgtgaatgaatacacaggacttattatatcagagtgagtaatcggttggttggttgattgattgattgattgatacattcagcttcctgctgctagcaatgccacgatttagatttaatgatgcttcagtggaaatcaatcagaaggtattctgaccttgtgaacatcagaaggtattttttaactcccaagcagtagcaggacgatgatagggctggagggctatggattcccagcccatccctgtgaaggagtaggccactctttaagtgaaggattggatgattgttcataatacataaagttctctgtaattacaactaaattattatgccctcttctcacagtcaaaaggaactgggtggtttggtttttgttgcttttttagatttattgtcccatgtgggatgagtttttaaatgccacaagacataatttaaaataaataaactttgggaaaaggtgtaaaacagtagccccatcacatttgtgatactgacaggtatcaacccagaagcccatgaactgtgtttccatcctttgcatttctctgcgagtagttccacacaggtttgtaagtaagtaagaaagaaggcaaattgattcaaatgttacaaaaaaacccttcttggtggattagacaggttaaatatataaacaaacaaacaaaaattgctcaaaaaagaggagaaaagctcaagaggaaaagctaaggactggtaggaaaaagctttactctttcatgccattttatttctttttgatttttaaatcattcattcaatagataccaccgtgtgacctataattttgcaaatctgttacctctgacatcaagtgtaattagcttttggagagtgggctgacatcaagtgtaattagcttttggagagtgggttttgtccattattaataattaattaattaacatcaaacacggcttctcatgctatttctacctcactttggttttggggtgttcctgataattgtgcacacctgagttcacagcttcaccacttgtccattgcgttattttctttttcctttataattctttctttttccttcataattttcaaaagaaaacccaaagctctaaggtaacaaattaccaaattacatgaagatttggtttttgtcttgcatttttttcctttatgtgacgctggaccttttctttacccaaggatttttaaaactcagatttaaaacaaggggttactttacatcctactaagaagtttaagtaagtaagtttcattctaaaatcagaggtaaatagagtgcataaataattttgttttaatctttttgtttttcttttagacacattagctctggagtgagtctgtcataatatttgaacaaaaattgagagctttattgctgcattttaagcataattaatttggacattatttcgtgttgtgttctttataaccaccaagtattaaactgtaaatcataatgtaactgaagcataaacatcacatggcatgttttgtcattgttttcaggtactgagttcttacttgagtatcataatatattgtgttttaacaccaacactgtaacatttacgaattatttttttaaacttcagttttactgcattttcacaacatatcagacttcaccaaatatatgccttactattgtattatagtactgctttactgtgtatctcaataaagcacgcagttatgttac

SEQ ID NO: 25 - protein, 604 aa, Homo sapiens
MREQLKGHETQTTCWDHPKMTELYQSLADLNNVRFSAYRTAMKLRRLQKALCLDLLSLSAACDALDQHNLKQNDQPMDILQIINCLTTIYDRLEQEHNNLVNVPLCVDMCLNWLLNVYDTGRTGRIRVLSFKTGIISLCKAHLEDKYRYLFKQVASSTGFCDQRRLGLLLHDSIQIPRQLGEVASFGGSNIEPSVRSCFQFANNKPEIEAALFLDWMRLEPQSMVWLPVLHRVAAAETAKHQAKCNICKECPIIGFRYRSLKHFNYDICQSCFFSGRVAKGHKMHYPMVEYCTPTTSGEDVRDFAKVLKNKFRTKRYFAKHPRMGYLPVQTVLEGDNMETPASSPQLSHDDTHSRIEHYASRLAEMENSNGSYLNDSISPNESIDDEHLLIQHYCQSLNQDSPLSQPRSPAQILISLESEERGELERILADLEEENRNLQAEYDRLKQQHEHKGLSPLPSPPEMMPTSPQSPRDAELIAEAKLLRQHKGRLEARMQILEDHNKQLESQLHRLRQLLEQPQAEAKVNGTTVSSPSTSLQRSDSSQPMLLRVVGSQTSDSMGEEDLLSPPQDTSTGLEEVMEQLNNSFPSSRGRNTPGKPMREDTM

SEQ ID NO: 26 - DNA, 4552 bp, Homo sapiens
actttcggggagcccggcggctctgggaagctcactcctccactcgtacccacactcgaccgcggagcccttgcagccatgagggaacagctcaaaggccacgagactcaaacaacttgctgggaccatcccaaaatgacagagctctaccagtctttagctgacctgaataatgtcagattctcagcttataggactgccatgaaactccgaagactgcagaaggccctttgcttggatctcttgagcctgtcagctgcatgtgatgccttggaccagcacaacctcaagcaaaatgaccagcccatggatatcctgcagattattaattgtttgaccactatttatgaccgcctggagcaagagcacaacaatttggtcaacgtccctctctgcgtggatatgtgtctgaactggctgctgaatgtttatgatacgggacgaacagggaggatccgtgtcctgtcttttaaaactggcatcatttccctgtgtaaagcacatttggaagacaagtacagataccttttcaagcaagtggcaagttcaacaggattttgtgaccagcgcaggctgggcctccttctgcatgattctatccaaattccaagacagttgggtgaagttgcatcctttgggggcagtaacattgagccaagtgtccggagctgcttccaatttgctaataataagccagagatcgaagcggccctcttcctagactggatgagactggaaccccagtccatggtgtggctgcccgtcctgcacagagtggctgctgcagaaactgccaagcatcaggccaaatgtaacatctgcaaagagtgtccaatcattggattcaggtacaggagtctaaagcactttaattatgacatctgccaaagctgctttttttctggtcgagttgcaaaaggccataaaatgcactatcccatggtggaatattgcactccgactacatcaggagaagatgttcgagactttgccaaggtactaaaaaacaaatttcgaaccaaaaggtattttgcgaagcatccccgaatgggctacctgccagtgcagactgtcttagagggggacaacatggaaacgcctgcctcgtcccctcagctttcacacgatgatactcattcacgcattgaacattatgctagcaggctagcagaaatggaaaacagcaatggatcttatctaaatgatagcatctctcctaatgagagcatagatgatgaacatttgttaatccagcattactgccaaagtttgaaccaggactcccccctgagccagcctcgtagtcctgcccagatcttgatttccttagagagtgaggaaagaggggagctagagagaatcctagcagatcttgaggaagaaaacaggaatctgcaagcagaatatgaccgtctaaagcagcagcacgaacataaaggcctgtccccactgccgtcccctcctgaaatgatgcccacctctccccagagtccccgggatgctgagctcattgctgaggccaagctactgcgtcaacacaaaggccgcctggaagccaggatgcaaatcctggaagaccacaataaacagctggagtcacagttacacaggctaaggcagctgctggagcaaccccaggcagaggccaaagtgaatggcacaacggtgtcctctccttctacctctctacagaggtccgacagcagtcagcctatgctgctccgagtggttggcagtcaaacttcggactccatgggtgaggaagatcttctcagtcctccccaggacacaagcacagggttagaggaggtgatggagcaactcaacaactccttccctagttcaagaggacacaatgtaggaagtcttttccacatggcagatgatttgggcagagcgatggagtccttagtatcagtcatgacagatgaagaaggagcagaataaatgttttacaactcctgattcccgcatggtttttataatattcatacaacaaagaggattagacagtaagagtttacaagaaataaatctatatttttgtgaagggtagtggtattatactgtagatttcagtagtttctaagtctgttattgttttgttaacaatggcaggttttacacgtctatgcaattgtacaaaaaagttataagaaaactacatgtaaaatcttgatagctaaataacttgccatttctttatatggaacgcattttgggttgtttaaaaatttataacagttataaagaaagattgtaaactaaagtgtgctttataaaaaaaagttgtttataaaaacccctaaaaacaaaacaaacacacacacacacacatacacacacacacacaaaactttgaggcagcgcattgttttgcatccttttggcgtgatatccatatgaaattcatggctttttctttttttgcatattaaagataagacttcctctaccaccacaccaaatgactactacacactgctcatttgagaactgtcagctgagtggggcaggcttgagttttcatttcatatatctatatgtctataagtatataaatactatagttatatagataaagagatacgaatttctatagactgactttttccattttttaaatgttcatgtcacatcctaatagaaagaaattacttctagtcagtcatccaggcttacctgcttggtctagaatggatttttcccggagccggaagccaggaggaaactacaccacactaaaacattgtctacagctccagatgtttctcattttaaacaactttccactgacaacgaaagtaaagtaaagtattggatttttttaaagggaacatgtgaatgaatacacaggacttattatatcagagtgagtaatcggttggttggttgattgattgattgattgatacattcagcttcctgctgctagcaatgccacgatttagatttaatgatgcttcagtggaaatcaatcagaaggtattctgaccttgtgaacatcagaaggtattttttaactcccaagcagtagcaggacgatgatagggctggagggctatggattcccagcccatccctgtgaaggagtaggccactctttaagtgaaggattggatgattgttcataatacataaagttctctgtaattacaactaaattattatgccctcttctcacagtcaaaaggaactgggtggtttggtttttgttgcttttttagatttattgtcccatgtgggatgagtttttaaatgccacaagacataatttaaaataaataaactttgggaaaaggtgtaaaacagtagccccatcacatttgtgatactgacaggtatcaacccagaagcccatgaactgtgtttccatcctttgcatttctctgcgagtagttccacacaggtttgtaagtaagtaagaaagaaggcaaattgattcaaatgttacaaaaaaacccttcttggtggattagacaggttaaatatataaacaaacaaacaaaaattgctcaaaaaagaggagaaaagctcaagaggaaaagctaaggactggtaggaaaaagctttactctttcatgccattttatttctttttgatttttaaatcattcattcaatagataccaccgtgtgacctataattttgcaaatctgttacctctgacatcaagtgtaattagcttttggagagtgggctgacatcaagtgtaattagcttttggagagtgggttttgtccattattaataattaattaattaacatcaaacacggcttctcatgctatttctacctcactttggttttggggtgttcctgataattgtgcacacctgagttcacagcttcaccacttgtccattgcgttattttctttttcctttataattctttctttttccttcataattttcaaaagaaaacccaaagctctaaggtaacaaattaccaaattacatgaagatttggtttttgtcttgcatttttttcctttatgtgacgctggaccttttctttacccaaggatttttaaaactcagatttaaaacaaggggttactttacatcctactaagaagtttaagtaagtaagtttcattctaaaatcagaggtaaatagagtgcataaataattttgttttaatctttttgtttttcttttagacacattagctctggagtgagtctgtcataatatttgaacaaaaattgagagctttattgctgcattttaagcataattaatttggacattatttcgtgttgtgttctttataaccaccaagtattaaactgtaaatcataatgtaactgaagcataaacatcacatggcatgttttgtcattgttttcaggtactgagttcttacttgagtatcataatatattgtgttttaacaccaacactgtaacatttacgaattatttttttaaacttcagttttactgcattttcacaacatatcagacttcaccaaatatatgccttactattgtattatagtactgctttactgtgtatctcaataaagcacgcagttatgttac

SEQ ID NO: 27 - protein, 622 aa, Homo sapiens
MREQLKGHETQTTCWDHPKMTELYQSLADLNNVRFSAYRTAMKLRRLQKALCLDLLSLSAACDALDQHNLKQNDQPMDILQIINCLTTIYDRLEQEHNNLVNVPLCVDMCLNWLLNVYDTGRTGRIRVLSFKTGIISLCKAHLEDKYRYLFKQVASSTGFCDQRRLGLLLHDSIQIPRQLGEVASFGGSNIEPSVRSCFQFANNKPEIEAALFLDWMRLEPQSMVWLPVLHRVAAAETAKHQAKCNICKECPIIGFRYRSLKHFNYDICQSCFFSGRVAKGHKMHYPMVEYCTPTTSGEDVRDFAKVLKNKFRTKRYFAKHPRMGYLPVQTVLEGDNMETPASSPQLSHDDTHSRIEHYASRLAEMENSNGSYLNDSISPNESIDDEHLLIQHYCQSLNQDSPLSQPRSPAQILISLESEERGELERILADLEEENRNLQAEYDRLKQQHEHKGLSPLPSPPEMMPTSPQSPRDAELIAEAKLLRQHKGRLEARMQILEDHNKQLESQLHRLRQLLEQPQAEAKVNGTTVSSPSTSLQRSDSSQPMLLRVVGSQTSDSMGEEDLLSPPQDTSTGLEEVMEQLNNSFPSSRGHNVGSLFHMADDLGRAMESLVSVMTDEEGAE

SEQ ID NO: 28 - DNA, 1571 bp, Homo sapiens
actttcggggagcccggcggctctgggaagctcactcctccactcgtacccacactcgaccgcggagcccttgcagccatgagggaacagctcaaaggccacgagactcaaacaacttgctgggaccatcccaaaatgacagagctctaccagtctttagctgacctgaataatgtcagattctcagcttataggactgccatgaaactccgaagactgcagaaggccctttgcttggatctcttgagcctgtcagctgcatgtgatgccttggaccagcacaacctcaagcaaaatgaccagcccatggatatcctgcagattattaattgtttgaccactatttatgaccgcctggagcaagagcacaacaatttggtcaacgtccctctctgcgtggatatgtgtctgaactggctgctgaatgtttatgatacgggacgaacagggaggatccgtgtcctgtcttttaaaactggcatcatttccctgtgtaaagcacatttggaagacaagtacagataccttttcaagcaagtggcaagttcaacaggattttgtgaccagcgcaggctgggcctccttctgcatgattctatccaaattccaagacagttgggtgaagttgcatcctttgggggcagtaacattgagccaagtgtccggagctgcttccaatttgctaataataagccagagatcgaagcggccctcttcctagactggatgagactggaaccccagtccatggtgtggctgcccgtcctgcacagagtggctgctgcagaaactgccaagcatcaggccaaatgtaacatctgcaaagagtgtccaatcattggattcaggtacaggagtctaaagcactttaattatgacatctgccaaagctgctttttttctggtcgagttgcaaaaggccataaaatgcactatcccatggtggaatattgcactccgactacatcaggagaagatgttcgagactttgccaaggtactaaaaaacaaatttcgaaccaaaaggtattttgcgaagcatccccgaatgggctacctgccagtgcagactgtcttagagggggacaacatggaaacgtgagtagtagcaaaagcagaacacactcttgtttgatgtatatttgaactcctctcagctgaacaccctccttcactcccaaatgcaaacagtctcttctatttctttctttttatttacattagctgaaaagagaaaaataagctgatgtccagttgccactttcccacgtcacttgacaatttctttttccaaaagttaaactttatctcacagggggaaaaaaaaaaaaaaaccacaacacaatacagccactaattgccttacaagccttataagaaatatgggactgtttacaaatgagtgattccagtatttcattttgattttcctctctcacaaatcagtaaatgtgtgtctttttgtatctcattgtgtggtcatatctagtcacttgtttctactcaaaagaaaatatagtcacaggaaactacttcacagtaagtagtaatgattctcaagatcaaagggga

SEQ ID NO: 29 - protein, 340 aa, Homo sapiens
MREQLKGHETQTTCWDHPKMTELYQSLADLNNVRFSAYRTAMKLRRLQKALCLDLLSLSAACDALDQHNLKQNDQPMDILQIINCLTTIYDRLEQEHNNLVNVPLCVDMCLNWLLNVYDTGRTGRIRVLSFKTGIISLCKAHLEDKYRYLFKQVASSTGFCDQRRLGLLLHDSIQIPRQLGEVASFGGSNIEPSVRSCFQFANNKPEIEAALFLDWMRLEPQSMVWLPVLHRVAAAETAKHQAKCNICKECPIIGFRYRSLKHFNYDICQSCFFSGRVAKGHKMHYPMVEYCTPTTSGEDVRDFAKVLKNKFRTKRYFAKHPRMGYLPVQTVLEGDNMET

SEQ ID NO: 30 - DNA, 7080 bp, Homo sapiens
acactagcaatggcaaagctttgtgcggaggcattgctggctgctctgaactaaaagcatccgtggggaccgaaagaggtttttgcacaccttattaaggaactccaggatggcattgggcagcggcaaactgttgtcagaacattgaatgcaactggggaagaaataattcagcaatcctcaaaaacagatgccagtattctacaggaaaaattgggaagcctgaatctgcggtggcaggaggtctgcaaacagctgtcagacagaaaaaagaggctagaagaacaaaagaatatcttgtcagaatttcaaagagatttaaatgaatttgttttatggttggaggaagcagataacattgctagtatcccacttgaacctggaaaagagcagcaactaaaagaaaagcttgagcaagtcaagttactggtggaagagttgcccctgcgccagggaattctcaaacaattaaatgaaactggaggacccgtgcttgtaagtgctcccataagcccagaagagcaagataaacttgaaaataagctcaagcagacaaatctccagtggataaaggtttccagagctttacctgagaaacaaggagaaattgaagctcaaataaaagaccttgggcagcttgaaaaaaagcttgaagaccttgaagagcagttaaatcatctgctgctgtggttatctcctattaggaatcagttggaaatttataaccaaccaaaccaagaaggaccatttgacgttcaggaaactgaaatagcagttcaagctaaacaaccggatgtggaagagattttgtctaaagggcagcatttgtacaaggaaaaaccagccactcagccagtgaagaggaagttagaagatctgagctctgagtggaaggcggtaaaccgtttacttcaagagctgagggcaaagcagcctgacctagctcctggactgaccactattggagcctctcctactcagactgttactctggtgacacaacctgtggttactaaggaaactgccatctccaaactagaaatgccatcttccttgatgttggaggtacctgctctggcagatttcaaccgggcttggacagaacttaccgactggctttctctgcttgatcaagttataaaatcacagagggtgatggtgggtgaccttgaggatatcaacgagatgatcatcaagcagaaggcaacaatgcaggatttggaacagaggcgtccccagttggaagaactcattaccgctgcccaaaatttgaaaaacaagaccagcaatcaagaggctagaacaatcattacggatcgaattgaaagaattcagaatcagtgggatgaagtacaagaacaccttcagaaccggaggcaacagttgaatgaaatgttaaaggattcaacacaatggctggaagctaaggaagaagctgagcaggtcttaggacaggccagagccaagcttgagtcatggaaggagggtccctatacagtagatgcaatccaaaagaaaatcacagaaaccaagcagttggccaaagacctccgccagtggcagacaaatgtagatgtggcaaatgacttggccctgaaacttctccgggattattctgcagatgataccagaaaagtccacatgataacagagaatatcaatgcctcttggagaagcattcataaaagggtgagtgagcgagaggctgctttggaagaaactcatagattactgcaacagttccccctggacctggaaaagtttcttgcctggcttacagaagctgaaacaactgccaatgtcctacaggatgctacccgtaaggaaaggctcctagaagactccaagggagtaaaagagctgatgaaacaatggcaagacctccaaggtgaaattgaagctcacacagatgtttatcacaacctggatgaaaacagccaaaaaatcctgagatccctggaaggttccgatgatgcagtcctgttacaaagacgtttggataacatgaacttcaagtggagtgaacttcggaaaaagtctctcaacattaggtcccatttggaagccagttctgaccagtggaagcgtctgcacctttctctgcaggaacttctggtgtggctacagctgaaagatgatgaattaagccggcaggcacctattggaggcgactttccagcagttcagaagcagaacgatgtacatagggccttcaagagggaattgaaaactaaagaacctgtaatcatgagtactcttgagactgtacgaatatttctgacagagcagcctttggaaggactagagaaactctaccaggagcccagagagctgcctcctgaggagagagcccagaatgtcactcggcttctacgaaagcaggctgaggaggtcaatactgagtgggaaaaattgaacctgcactccgctgactggcagagaaaaatagatgagacccttgaaagactccaggaacttcaagaggccacggatgagctggacctcaagctgcgccaagctgaggtgatcaagggatcctggcagcccgtgggcgatctcctcattgactctctccaagatcacctcgagaaagtcaaggcacttcgaggagaaattgcgcctctgaaagagaacgtgagccacgtcaatgaccttgctcgccagcttaccactttgggcattcagctctcaccgtataacctcagcactctggaagacctgaacaccagatggaagcttctgcaggtggccgtcgaggaccgagtcaggcagctgcatgaagcccacagggactttggtccagcatctcagcactttctttccacgtctgtccagggtccctgggagagagccatctcgccaaacaaagtgccctactatatcaaccacgagactcaaacaacttgctgggaccatcccaaaatgacagagctctaccagtctttagctgacctgaataatgtcagattctcagcttataggactgccatgaaactccgaagactgcagaaggccctttgcttggatctcttgagcctgtcagctgcatgtgatgccttggaccagcacaacctcaagcaaaatgaccagcccatggatatcctgcagattattaattgtttgaccactatttatgaccgcctggagcaagagcacaacaatttggtcaacgtccctctctgcgtggatatgtgtctgaactggctgctgaatgtttatgatacgggacgaacagggaggatccgtgtcctgtcttttaaaactggcatcatttccctgtgtaaagcacatttggaagacaagtacagataccttttcaagcaagtggcaagttcaacaggattttgtgaccagcgcaggctgggcctccttctgcatgattctatccaaattccaagacagttgggtgaagttgcatcctttgggggcagtaacattgagccaagtgtccggagctgcttccaatttgctaataataagccagagatcgaagcggccctcttcctagactggatgagactggaaccccagtccatggtgtggctgcccgtcctgcacagagtggctgctgcagaaactgccaagcatcaggccaaatgtaacatctgcaaagagtgtccaatcattggattcaggtacaggagtctaaagcactttaattatgacatctgccaaagctgctttttttctggtcgagttgcaaaaggccataaaatgcactatcccatggtggaatattgcactccgactacatcaggagaagatgttcgagactttgccaaggtactaaaaaacaaatttcgaaccaaaaggtattttgcgaagcatccccgaatgggctacctgccagtgcagactgtcttagagggggacaacatggaaacgaatctgcaagcagaatatgaccgtctaaagcagcagcacgaacataaaggcctgtccccactgccgtcccctcctgaaatgatgcccacctctccccagagtccccgggatgctgagctcattgctgaggccaagctactgcgtcaacacaaaggccgcctggaagccaggatgcaaatcctggaagaccacaataaacagctggagtcacagttacacaggctaaggcagctgctggagcaaccccaggcagaggccaaagtgaatggcacaacggtgtcctctccttctacctctctacagaggtccgacagcagtcagcctatgctgctccgagtggttggcagtcaaacttcggactccatgggtgaggaagatcttctcagtcctccccaggacacaagcacagggttagaggaggtgatggagcaactcaacaactccttccctagttcaagaggaagaaatacccctggaaagccaatgagagaggacacaatgtaggaagtcttttccacatggcagatgatttgggcagagcgatggagtccttagtatcagtcatgacagatgaagaaggagcagaataaatgttttacaactcctgattcccgcatggtttttataatattcatacaacaaagaggattagacagtaagagtttacaagaaataaatctatatttttgtgaagggtagtggtattatactgtagatttcagtagtttctaagtctgttattgttttgttaacaatggcaggttttacacgtctatgcaattgtacaaaaaagttataagaaaactacatgtaaaatcttgatagctaaataacttgccatttctttatatggaacgcattttgggttgtttaaaaatttataacagttataaagaaagattgtaaactaaagtgtgctttataaaaaaaagttgtttataaaaacccctaaaaacaaaacaaacacacacacacacacatacacacacacacacaaaactttgaggcagcgcattgttttgcatccttttggcgtgatatccatatgaaattcatggctttttctttttttgcatattaaagataagacttcctctaccaccacaccaaatgactactacacactgctcatttgagaactgtcagctgagtggggcaggcttgagttttcatttcatatatctatatgtctataagtatataaatactatagttatatagataaagagatacgaatttctatagactgactttttccattttttaaatgttcatgtcacatcctaatagaaagaaattacttctagtcagtcatccaggcttacctgcttggtctagaatggatttttcccggagccggaagccaggaggaaactacaccacactaaaacattgtctacagctccagatgtttctcattttaaacaactttccactgacaacgaaagtaaagtaaagtattggatttttttaaagggaacatgtgaatgaatacacaggacttattatatcagagtgagtaatcggttggttggttgattgattgattgattgatacattcagcttcctgctgctagcaatgccacgatttagatttaatgatgcttcagtggaaatcaatcagaaggtattctgaccttgtgaacatcagaaggtattttttaactcccaagcagtagcaggacgatgatagggctggagggctatggattcccagcccatccctgtgaaggagtaggccactctttaagtgaaggattggatgattgttcataatacataaagttctctgtaattacaactaaattattatgccctcttctcacagtcaaaaggaactgggtggtttggtttttgttgcttttttagatttattgtcccatgtgggatgagtttttaaatgccacaagacataatttaaaataaataaactttgggaaaaggtgtaaaacagtagccccatcacatttgtgatactgacaggtatcaacccagaagcccatgaactgtgtttccatcctttgcatttctctgcgagtagttccacacaggtttgtaagtaagtaagaaagaaggcaaattgattcaaatgttacaaaaaaacccttcttggtggattagacaggttaaatatataaacaaacaaacaaaaattgctcaaaaaagaggagaaaagctcaagaggaaaagctaaggactggtaggaaaaagctttactctttcatgccattttatttctttttgatttttaaatcattcattcaatagataccaccgtgtgacctataattttgcaaatctgttacctctgacatcaagtgtaattagcttttggagagtgggctgacatcaagtgtaattagcttttggagagtgggttttgtccattattaataattaattaattaacatcaaacacggcttctcatgctatttctacctcactttggttttggggtgttcctgataattgtgcacacctgagttcacagcttcaccacttgtccattgcgttattttctttttcctttataattctttctttttccttcataattttcaaaagaaaacccaaagctctaaggtaacaaattaccaaattacatgaagatttggtttttgtcttgcatttttttcctttatgtgacgctggaccttttctttacccaaggatttttaaaactcagatttaaaacaaggggttactttacatcctactaagaagtttaagtaagtaagtttcattctaaaatcagaggtaaatagagtgcataaataattttgttttaatctttttgtttttcttttagacacattagctctggagtgagtctgtcataatatttgaacaaaaattgagagctttattgctgcattttaagcataattaatttggacattatttcgtgttgtgttctttataaccaccaagtattaaactgtaaatcataatgtaactgaagcataaacatcacatggcatgttttgtcattgttttcaggtactgagttcttacttgagtatcataatatattgtgttttaacaccaacactgtaacatttacgaattatttttttaaacttcagttttactgcattttcacaacatatcagacttcaccaaatatatgccttactattgtattatagtactgctttactgtgtatctcaataaagcacgcagttatgttac

SEQ ID NO: 31 - protein, 1115 aa, Homo sapiens
MPSSLMLEVPALADFNRAWTELTDWLSLLDQVIKSQRVMVGDLEDINEMIIKQKATMQDLEQRRPQLEELITAAQNLKNKTSNQEARTIITDRIERIQNQWDEVQEHLQNRRQQLNEMLKDSTQWLEAKEEAEQVLGQARAKLESWKEGPYTVDAIQKKITETKQLAKDLRQWQTNVDVANDLALKLLRDYSADDTRKVHMITENINASWRSIHKRVSEREAALEETHRLLQQFPLDLEKFLAWLTEAETTANVLQDATRKERLLEDSKGVKELMKQWQDLQGEIEAHTDVYHNLDENSQKILRSLEGSDDAVLLQRRLDNMNFKWSELRKKSLNIRSHLEASSDQWKRLHLSLQELLVWLQLKDDELSRQAPIGGDFPAVQKQNDVHRAFKRELKTKEPVIMSTLETVRIFLTEQPLEGLEKLYQEPRELPPEERAQNVTRLLRKQAEEVNTEWEKLNLHSADWQRKIDETLERLQELQEATDELDLKLRQAEVIKGSWQPVGDLLIDSLQDHLEKVKALRGEIAPLKENVSHVNDLARQLTTLGIQLSPYNLSTLEDLNTRWKLLQVAVEDRVRQLHEAHRDFGPASQHFLSTSVQGPWERAISPNKVPYYINHETQTTCWDHPKMTELYQSLADLNNVRFSAYRTAMKLRRLQKALCLDLLSLSAACDALDQHNLKQNDQPMDILQIINCLTTIYDRLEQEHNNLVNVPLCVDMCLNWLLNVYDTGRTGRIRVLSFKTGIISLCKAHLEDKYRYLFKQVASSTGFCDQRRLGLLLHDSIQIPRQLGEVASFGGSNIEPSVRSCFQFANNKPEIEAALFLDWMRLEPQSMVWLPVLHRVAAAETAKHQAKCNICKECPIIGFRYRSLKHFNYDICQSCFFSGRVAKGHKMHYPMVEYCTPTTSGEDVRDFAKVLKNKFRTKRYFAKHPRMGYLPVQTVLEGDNMETNLQAEYDRLKQQHEHKGLSPLPSPPEMMPTSPQSPRDAELIAEAKLLRQHKGRLEARMQILEDHNKQLESQLHRLRQLLEQPQAEAKVNGTTVSSPSTSLQRSDSSQPMLLRVVGSQTSDSMGEEDLLSPPQDTSTGLEEVMEQLNNSFPSSRGRNTPGKPMREDTM

SEQ ID NO: 32 - DNA, 7378 bp, Homo sapiens
acactagcaatggcaaagctttgtgcggaggcattgctggctgctctgaactaaaagcatccgtggggaccgaaagaggtttttgcacaccttattaaggaactccaggatggcattgggcagcggcaaactgttgtcagaacattgaatgcaactggggaagaaataattcagcaatcctcaaaaacagatgccagtattctacaggaaaaattgggaagcctgaatctgcggtggcaggaggtctgcaaacagctgtcagacagaaaaaagaggctagaagaacaaaagaatatcttgtcagaatttcaaagagatttaaatgaatttgttttatggttggaggaagcagataacattgctagtatcccacttgaacctggaaaagagcagcaactaaaagaaaagcttgagcaagtcaagttactggtggaagagttgcccctgcgccagggaattctcaaacaattaaatgaaactggaggacccgtgcttgtaagtgctcccataagcccagaagagcaagataaacttgaaaataagctcaagcagacaaatctccagtggataaaggtttccagagctttacctgagaaacaaggagaaattgaagctcaaataaaagaccttgggcagcttgaaaaaaagcttgaagaccttgaagagcagttaaatcatctgctgctgtggttatctcctattaggaatcagttggaaatttataaccaaccaaaccaagaaggaccatttgacgttcaggaaactgaaatagcagttcaagctaaacaaccggatgtggaagagattttgtctaaagggcagcatttgtacaaggaaaaaccagccactcagccagtgaagaggaagttagaagatctgagctctgagtggaaggcggtaaaccgtttacttcaagagctgagggcaaagcagcctgacctagctcctggactgaccactattggagcctctcctactcagactgttactctggtgacacaacctgtggttactaaggaaactgccatctccaaactagaaatgccatcttccttgatgttggaggtacctgctctggcagatttcaaccgggcttggacagaacttaccgactggctttctctgcttgatcaagttataaaatcacagagggtgatggtgggtgaccttgaggatatcaacgagatgatcatcaagcagaaggcaacaatgcaggatttggaacagaggcgtccccagttggaagaactcattaccgctgcccaaaatttgaaaaacaagaccagcaatcaagaggctagaacaatcattacggatcgaattgaaagaattcagaatcagtgggatgaagtacaagaacaccttcagaaccggaggcaacagttgaatgaaatgttaaaggattcaacacaatggctggaagctaaggaagaagctgagcaggtcttaggacaggccagagccaagcttgagtcatggaaggagggtccctatacagtagatgcaatccaaaagaaaatcacagaaaccaagcagttggccaaagacctccgccagtggcagacaaatgtagatgtggcaaatgacttggccctgaaacttctccgggattattctgcagatgataccagaaaagtccacatgataacagagaatatcaatgcctcttggagaagcattcataaaagggtgagtgagcgagaggctgctttggaagaaactcatagattactgcaacagttccccctggacctggaaaagtttcttgcctggcttacagaagctgaaacaactgccaatgtcctacaggatgctacccgtaaggaaaggctcctagaagactccaagggagtaaaagagctgatgaaacaatggcaagacctccaaggtgaaattgaagctcacacagatgtttatcacaacctggatgaaaacagccaaaaaatcctgagatccctggaaggttccgatgatgcagtcctgttacaaagacgtttggataacatgaacttcaagtggagtgaacttcggaaaaagtctctcaacattaggtcccatttggaagccagttctgaccagtggaagcgtctgcacctttctctgcaggaacttctggtgtggctacagctgaaagatgatgaattaagccggcaggcacctattggaggcgactttccagcagttcagaagcagaacgatgtacatagggccttcaagagggaattgaaaactaaagaacctgtaatcatgagtactcttgagactgtacgaatatttctgacagagcagcctttggaaggactagagaaactctaccaggagcccagagagctgcctcctgaggagagagcccagaatgtcactcggcttctacgaaagcaggctgaggaggtcaatactgagtgggaaaaattgaacctgcactccgctgactggcagagaaaaatagatgagacccttgaaagactccaggaacttcaagaggccacggatgagctggacctcaagctgcgccaagctgaggtgatcaagggatcctggcagcccgtgggcgatctcctcattgactctctccaagatcacctcgagaaagtcaaggcacttcgaggagaaattgcgcctctgaaagagaacgtgagccacgtcaatgaccttgctcgccagcttaccactttgggcattcagctctcaccgtataacctcagcactctggaagacctgaacaccagatggaagcttctgcaggtggccgtcgaggaccgagtcaggcagctgcatgaagcccacagggactttggtccagcatctcagcactttctttccacgtctgtccagggtccctgggagagagccatctcgccaaacaaagtgccctactatatcaaccacgagactcaaacaacttgctgggaccatcccaaaatgacagagctctaccagtctttagctgacctgaataatgtcagattctcagcttataggactgccatgaaactccgaagactgcagaaggccctttgcttggatctcttgagcctgtcagctgcatgtgatgccttggaccagcacaacctcaagcaaaatgaccagcccatggatatcctgcagattattaattgtttgaccactatttatgaccgcctggagcaagagcacaacaatttggtcaacgtccctctctgcgtggatatgtgtctgaactggctgctgaatgtttatgatacgggacgaacagggaggatccgtgtcctgtcttttaaaactggcatcatttccctgtgtaaagcacatttggaagacaagtacagataccttttcaagcaagtggcaagttcaacaggattttgtgaccagcgcaggctgggcctccttctgcatgattctatccaaattccaagacagttgggtgaagttgcatcctttgggggcagtaacattgagccaagtgtccggagctgcttccaatttgctaataataagccagagatcgaagcggccctcttcctagactggatgagactggaaccccagtccatggtgtggctgcccgtcctgcacagagtggctgctgcagaaactgccaagcatcaggccaaatgtaacatctgcaaagagtgtccaatcattggattcaggtacaggagtctaaagcactttaattatgacatctgccaaagctgctttttttctggtcgagttgcaaaaggccataaaatgcactatcccatggtggaatattgcactccgactacatcaggagaagatgttcgagactttgccaaggtactaaaaaacaaatttcgaaccaaaaggtattttgcgaagcatccccgaatgggctacctgccagtgcagactgtcttagagggggacaacatggaaactcccgttactctgatcaacttctggccagtagattctgcgcctgcctcgtcccctcagctttcacacgatgatactcattcacgcattgaacattatgctagcaggctagcagaaatggaaaacagcaatggatcttatctaaatgatagcatctctcctaatgagagcatagatgatgaacatttgttaatccagcattactgccaaagtttgaaccaggactcccccctgagccagcctcgtagtcctgcccagatcttgatttccttagagagtgaggaaagaggggagctagagagaatcctagcagatcttgaggaagaaaacaggaatctgcaagcagaatatgaccgtctaaagcagcagcacgaacataaaggcctgtccccactgccgtcccctcctgaaatgatgcccacctctccccagagtccccgggatgctgagctcattgctgaggccaagctactgcgtcaacacaaaggccgcctggaagccaggatgcaaatcctggaagaccacaataaacagctggagtcacagttacacaggctaaggcagctgctggagcaaccccaggcagaggccaaagtgaatggcacaacggtgtcctctccttctacctctctacagaggtccgacagcagtcagcctatgctgctccgagtggttggcagtcaaacttcggactccatgggtgaggaagatcttctcagtcctccccaggacacaagcacagggttagaggaggtgatggagcaactcaacaactccttccctagttcaagaggacacaatgtaggaagtcttttccacatggcagatgatttgggcagagcgatggagtccttagtatcagtcatgacagatgaagaaggagcagaataaatgttttacaactcctgattcccgcatggtttttataatattcatacaacaaagaggattagacagtaagagtttacaagaaataaatctatatttttgtgaagggtagtggtattatactgtagatttcagtagtttctaagtctgttattgttttgttaacaatggcaggttttacacgtctatgcaattgtacaaaaaagttataagaaaactacatgtaaaatcttgatagctaaataacttgccatttctttatatggaacgcattttgggttgtttaaaaatttataacagttataaagaaagattgtaaactaaagtgtgctttataaaaaaaagttgtttataaaaacccctaaaaacaaaacaaacacacacacacacacatacacacacacacacaaaactttgaggcagcgcattgttttgcatccttttggcgtgatatccatatgaaattcatggctttttctttttttgcatattaaagataagacttcctctaccaccacaccaaatgactactacacactgctcatttgagaactgtcagctgagtggggcaggcttgagttttcatttcatatatctatatgtctataagtatataaatactatagttatatagataaagagatacgaatttctatagactgactttttccattttttaaatgttcatgtcacatcctaatagaaagaaattacttctagtcagtcatccaggcttacctgcttggtctagaatggatttttcccggagccggaagccaggaggaaactacaccacactaaaacattgtctacagctccagatgtttctcattttaaacaactttccactgacaacgaaagtaaagtaaagtattggatttttttaaagggaacatgtgaatgaatacacaggacttattatatcagagtgagtaatcggttggttggttgattgattgattgattgatacattcagcttcctgctgctagcaatgccacgatttagatttaatgatgcttcagtggaaatcaatcagaaggtattctgaccttgtgaacatcagaaggtattttttaactcccaagcagtagcaggacgatgatagggctggagggctatggattcccagcccatccctgtgaaggagtaggccactctttaagtgaaggattggatgattgttcataatacataaagttctctgtaattacaactaaattattatgccctcttctcacagtcaaaaggaactgggtggtttggtttttgttgcttttttagatttattgtcccatgtgggatgagtttttaaatgccacaagacataatttaaaataaataaactttgggaaaaggtgtaaaacagtagccccatcacatttgtgatactgacaggtatcaacccagaagcccatgaactgtgtttccatcctttgcatttctctgcgagtagttccacacaggtttgtaagtaagtaagaaagaaggcaaattgattcaaatgttacaaaaaaacccttcttggtggattagacaggttaaatatataaacaaacaaacaaaaattgctcaaaaaagaggagaaaagctcaagaggaaaagctaaggactggtaggaaaaagctttactctttcatgccattttatttctttttgatttttaaatcattcattcaatagataccaccgtgtgacctataattttgcaaatctgttacctctgacatcaagtgtaattagcttttggagagtgggctgacatcaagtgtaattagcttttggagagtgggttttgtccattattaataattaattaattaacatcaaacacggcttctcatgctatttctacctcactttggttttggggtgttcctgataattgtgcacacctgagttcacagcttcaccacttgtccattgcgttattttctttttcctttataattctttctttttccttcataattttcaaaagaaaacccaaagctctaaggtaacaaattaccaaattacatgaagatttggtttttgtcttgcatttttttcctttatgtgacgctggaccttttctttacccaaggatttttaaaactcagatttaaaacaaggggttactttacatcctactaagaagtttaagtaagtaagtttcattctaaaatcagaggtaaatagagtgcataaataattttgttttaatctttttgtttttcttttagacacattagctctggagtgagtctgtcataatatttgaacaaaaattgagagctttattgctgcattttaagcataattaatttggacattatttcgtgttgtgttctttataaccaccaagtattaaactgtaaatcataatgtaactgaagcataaacatcacatggcatgttttgtcattgttttcaggtactgagttcttacttgagtatcataatatattgtgttttaacaccaacactgtaacatttacgaattatttttttaaacttcagttttactgcattttcacaacatatcagacttcaccaaatatatgccttactattgtattatagtactgctttactgtgtatctcaataaagcacgcagttatgttac

SEQ ID NO: 33 - protein, 1243 aa, Homo sapiens
MPSSLMLEVPALADFNRAWTELTDWLSLLDQVIKSQRVMVGDLEDINEMIIKQKATMQDLEQRRPQLEELITAAQNLKNKTSNQEARTIITDRIERIQNQWDEVQEHLQNRRQQLNEMLKDSTQWLEAKEEAEQVLGQARAKLESWKEGPYTVDAIQKKITETKQLAKDLRQWQTNVDVANDLALKLLRDYSADDTRKVHMITENINASWRSIHKRVSEREAALEETHRLLQQFPLDLEKFLAWLTEAETTANVLQDATRKERLLEDSKGVKELMKQWQDLQGEIEAHTDVYHNLDENSQKILRSLEGSDDAVLLQRRLDNMNFKWSELRKKSLNIRSHLEASSDQWKRLHLSLQELLVWLQLKDDELSRQAPIGGDFPAVQKQNDVHRAFKRELKTKEPVIMSTLETVRIFLTEQPLEGLEKLYQEPRELPPEERAQNVTRLLRKQAEEVNTEWEKLNLHSADWQRKIDETLERLQELQEATDELDLKLRQAEVIKGSWQPVGDLLIDSLQDHLEKVKALRGEIAPLKENVSHVNDLARQLTTLGIQLSPYNLSTLEDLNTRWKLLQVAVEDRVRQLHEAHRDFGPASQHFLSTSVQGPWERAISPNKVPYYINHETQTTCWDHPKMTELYQSLADLNNVRFSAYRTAMKLRRLQKALCLDLLSLSAACDALDQHNLKQNDQPMDILQIINCLTTIYDRLEQEHNNLVNVPLCVDMCLNWLLNVYDTGRTGRIRVLSFKTGIISLCKAHLEDKYRYLFKQVASSTGFCDQRRLGLLLHDSIQIPRQLGEVASFGGSNIEPSVRSCFQFANNKPEIEAALFLDWMRLEPQSMVWLPVLHRVAAAETAKHQAKCNICKECPIIGFRYRSLKHFNYDICQSCFFSGRVAKGHKMHYPMVEYCTPTTSGEDVRDFAKVLKNKFRTKRYFAKHPRMGYLPVQTVLEGDNMETPVTLINFWPVDSAPASSPQLSHDDTHSRIEHYASRLAEMENSNGSYLNDSISPNESIDDEHLLIQHYCQSLNQDSPLSQPRSPAQILISLESEERGELERILADLEEENRNLQAEYDRLKQQHEHKGLSPLPSPPEMMPTSPQSPRDAELIAEAKLLRQHKGRLEARMQILEDHNKQLESQLHRLRQLLEQPQAEAKVNGTTVSSPSTSLQRSDSSQPMLLRVVGSQTSDSMGEEDLLSPPQDTSTGLEEVMEQLNNSFPSSRGHNVGSLFHMADDLGRAMESLVSVMTDEEGAE

SEQ ID NO: 34 - DNA, 7339 bp, Homo sapiens
acactagcaatggcaaagctttgtgcggaggcattgctggctgctctgaactaaaagcatccgtggggaccgaaagaggtttttgcacaccttattaaggaactccaggatggcattgggcagcggcaaactgttgtcagaacattgaatgcaactggggaagaaataattcagcaatcctcaaaaacagatgccagtattctacaggaaaaattgggaagcctgaatctgcggtggcaggaggtctgcaaacagctgtcagacagaaaaaagaggctagaagaacaaaagaatatcttgtcagaatttcaaagagatttaaatgaatttgttttatggttggaggaagcagataacattgctagtatcccacttgaacctggaaaagagcagcaactaaaagaaaagcttgagcaagtcaagttactggtggaagagttgcccctgcgccagggaattctcaaacaattaaatgaaactggaggacccgtgcttgtaagtgctcccataagcccagaagagcaagataaacttgaaaataagctcaagcagacaaatctccagtggataaaggtttccagagctttacctgagaaacaaggagaaattgaagctcaaataaaagaccttgggcagcttgaaaaaaagcttgaagaccttgaagagcagttaaatcatctgctgctgtggttatctcctattaggaatcagttggaaatttataaccaaccaaaccaagaaggaccatttgacgttcaggaaactgaaatagcagttcaagctaaacaaccggatgtggaagagattttgtctaaagggcagcatttgtacaaggaaaaaccagccactcagccagtgaagaggaagttagaagatctgagctctgagtggaaggcggtaaaccgtttacttcaagagctgagggcaaagcagcctgacctagctcctggactgaccactattggagcctctcctactcagactgttactctggtgacacaacctgtggttactaaggaaactgccatctccaaactagaaatgccatcttccttgatgttggaggtacctgctctggcagatttcaaccgggcttggacagaacttaccgactggctttctctgcttgatcaagttataaaatcacagagggtgatggtgggtgaccttgaggatatcaacgagatgatcatcaagcagaaggcaacaatgcaggatttggaacagaggcgtccccagttggaagaactcattaccgctgcccaaaatttgaaaaacaagaccagcaatcaagaggctagaacaatcattacggatcgaattgaaagaattcagaatcagtgggatgaagtacaagaacaccttcagaaccggaggcaacagttgaatgaaatgttaaaggattcaacacaatggctggaagctaaggaagaagctgagcaggtcttaggacaggccagagccaagcttgagtcatggaaggagggtccctatacagtagatgcaatccaaaagaaaatcacagaaaccaagcagttggccaaagacctccgccagtggcagacaaatgtagatgtggcaaatgacttggccctgaaacttctccgggattattctgcagatgataccagaaaagtccacatgataacagagaatatcaatgcctcttggagaagcattcataaaagggtgagtgagcgagaggctgctttggaagaaactcatagattactgcaacagttccccctggacctggaaaagtttcttgcctggcttacagaagctgaaacaactgccaatgtcctacaggatgctacccgtaaggaaaggctcctagaagactccaagggagtaaaagagctgatgaaacaatggcaagacctccaaggtgaaattgaagctcacacagatgtttatcacaacctggatgaaaacagccaaaaaatcctgagatccctggaaggttccgatgatgcagtcctgttacaaagacgtttggataacatgaacttcaagtggagtgaacttcggaaaaagtctctcaacattaggtcccatttggaagccagttctgaccagtggaagcgtctgcacctttctctgcaggaacttctggtgtggctacagctgaaagatgatgaattaagccggcaggcacctattggaggcgactttccagcagttcagaagcagaacgatgtacatagggccttcaagagggaattgaaaactaaagaacctgtaatcatgagtactcttgagactgtacgaatatttctgacagagcagcctttggaaggactagagaaactctaccaggagcccagagagctgcctcctgaggagagagcccagaatgtcactcggcttctacgaaagcaggctgaggaggtcaatactgagtgggaaaaattgaacctgcactccgctgactggcagagaaaaatagatgagacccttgaaagactccaggaacttcaagaggccacggatgagctggacctcaagctgcgccaagctgaggtgatcaagggatcctggcagcccgtgggcgatctcctcattgactctctccaagatcacctcgagaaagtcaaggcacttcgaggagaaattgcgcctctgaaagagaacgtgagccacgtcaatgaccttgctcgccagcttaccactttgggcattcagctctcaccgtataacctcagcactctggaagacctgaacaccagatggaagcttctgcaggtggccgtcgaggaccgagtcaggcagctgcatgaagcccacagggactttggtccagcatctcagcactttctttccacgtctgtccagggtccctgggagagagccatctcgccaaacaaagtgccctactatatcaaccacgagactcaaacaacttgctgggaccatcccaaaatgacagagctctaccagtctttagctgacctgaataatgtcagattctcagcttataggactgccatgaaactccgaagactgcagaaggccctttgcttggatctcttgagcctgtcagctgcatgtgatgccttggaccagcacaacctcaagcaaaatgaccagcccatggatatcctgcagattattaattgtttgaccactatttatgaccgcctggagcaagagcacaacaatttggtcaacgtccctctctgcgtggatatgtgtctgaactggctgctgaatgtttatgatacgggacgaacagggaggatccgtgtcctgtcttttaaaactggcatcatttccctgtgtaaagcacatttggaagacaagtacagataccttttcaagcaagtggcaagttcaacaggattttgtgaccagcgcaggctgggcctccttctgcatgattctatccaaattccaagacagttgggtgaagttgcatcctttgggggcagtaacattgagccaagtgtccggagctgcttccaatttgctaataataagccagagatcgaagcggccctcttcctagactggatgagactggaaccccagtccatggtgtggctgcccgtcctgcacagagtggctgctgcagaaactgccaagcatcaggccaaatgtaacatctgcaaagagtgtccaatcattggattcaggtacaggagtctaaagcactttaattatgacatctgccaaagctgctttttttctggtcgagttgcaaaaggccataaaatgcactatcccatggtggaatattgcactccgactacatcaggagaagatgttcgagactttgccaaggtactaaaaaacaaatttcgaaccaaaaggtattttgcgaagcatccccgaatgggctacctgccagtgcagactgtcttagagggggacaacatggaaacgcctgcctcgtcccctcagctttcacacgatgatactcattcacgcattgaacattatgctagcaggctagcagaaatggaaaacagcaatggatcttatctaaatgatagcatctctcctaatgagagcatagatgatgaacatttgttaatccagcattactgccaaagtttgaaccaggactcccccctgagccagcctcgtagtcctgcccagatcttgatttccttagagagtgaggaaagaggggagctagagagaatcctagcagatcttgaggaagaaaacaggaatctgcaagcagaatatgaccgtctaaagcagcagcacgaacataaaggcctgtccccactgccgtcccctcctgaaatgatgcccacctctccccagagtccccgggatgctgagctcattgctgaggccaagctactgcgtcaacacaaaggccgcctggaagccaggatgcaaatcctggaagaccacaataaacagctggagtcacagttacacaggctaaggcagctgctggagcaaccccaggcagaggccaaagtgaatggcacaacggtgtcctctccttctacctctctacagaggtccgacagcagtcagcctatgctgctccgagtggttggcagtcaaacttcggactccatgggtgaggaagatcttctcagtcctccccaggacacaagcacagggttagaggaggtgatggagcaactcaacaactccttccctagttcaagaggacacaatgtaggaagtcttttccacatggcagatgatttgggcagagcgatggagtccttagtatcagtcatgacagatgaagaaggagcagaataaatgttttacaactcctgattcccgcatggtttttataatattcatacaacaaagaggattagacagtaagagtttacaagaaataaatctatatttttgtgaagggtagtggtattatactgtagatttcagtagtttctaagtctgttattgttttgttaacaatggcaggttttacacgtctatgcaattgtacaaaaaagttataagaaaactacatgtaaaatcttgatagctaaataacttgccatttctttatatggaacgcattttgggttgtttaaaaatttataacagttataaagaaagattgtaaactaaagtgtgctttataaaaaaaagttgtttataaaaacccctaaaaacaaaacaaacacacacacacacacatacacacacacacacaaaactttgaggcagcgcattgttttgcatccttttggcgtgatatccatatgaaattcatggctttttctttttttgcatattaaagataagacttcctctaccaccacaccaaatgactactacacactgctcatttgagaactgtcagctgagtggggcaggcttgagttttcatttcatatatctatatgtctataagtatataaatactatagttatatagataaagagatacgaatttctatagactgactttttccattttttaaatgttcatgtcacatcctaatagaaagaaattacttctagtcagtcatccaggcttacctgcttggtctagaatggatttttcccggagccggaagccaggaggaaactacaccacactaaaacattgtctacagctccagatgtttctcattttaaacaactttccactgacaacgaaagtaaagtaaagtattggatttttttaaagggaacatgtgaatgaatacacaggacttattatatcagagtgagtaatcggttggttggttgattgattgattgattgatacattcagcttcctgctgctagcaatgccacgatttagatttaatgatgcttcagtggaaatcaatcagaaggtattctgaccttgtgaacatcagaaggtattttttaactcccaagcagtagcaggacgatgatagggctggagggctatggattcccagcccatccctgtgaaggagtaggccactctttaagtgaaggattggatgattgttcataatacataaagttctctgtaattacaactaaattattatgccctcttctcacagtcaaaaggaactgggtggtttggtttttgttgcttttttagatttattgtcccatgtgggatgagtttttaaatgccacaagacataatttaaaataaataaactttgggaaaaggtgtaaaacagtagccccatcacatttgtgatactgacaggtatcaacccagaagcccatgaactgtgtttccatcctttgcatttctctgcgagtagttccacacaggtttgtaagtaagtaagaaagaaggcaaattgattcaaatgttacaaaaaaacccttcttggtggattagacaggttaaatatataaacaaacaaacaaaaattgctcaaaaaagaggagaaaagctcaagaggaaaagctaaggactggtaggaaaaagctttactctttcatgccattttatttctttttgatttttaaatcattcattcaatagataccaccgtgtgacctataattttgcaaatctgttacctctgacatcaagtgtaattagcttttggagagtgggctgacatcaagtgtaattagcttttggagagtgggttttgtccattattaataattaattaattaacatcaaacacggcttctcatgctatttctacctcactttggttttggggtgttcctgataattgtgcacacctgagttcacagcttcaccacttgtccattgcgttattttctttttcctttataattctttctttttccttcataattttcaaaagaaaacccaaagctctaaggtaacaaattaccaaattacatgaagatttggtttttgtcttgcatttttttcctttatgtgacgctggaccttttctttacccaaggatttttaaaactcagatttaaaacaaggggttactttacatcctactaagaagtttaagtaagtaagtttcattctaaaatcagaggtaaatagagtgcataaataattttgttttaatctttttgtttttcttttagacacattagctctggagtgagtctgtcataatatttgaacaaaaattgagagctttattgctgcattttaagcataattaatttggacattatttcgtgttgtgttctttataaccaccaagtattaaactgtaaatcataatgtaactgaagcataaacatcacatggcatgttttgtcattgttttcaggtactgagttcttacttgagtatcataatatattgtgttttaacaccaacactgtaacatttacgaattatttttttaaacttcagttttactgcattttcacaacatatcagacttcaccaaatatatgccttactattgtattatagtactgctttactgtgtatctcaataaagcacgcagttatgttac

SEQ ID NO: 35 - protein, 1230 aa, Homo sapiens
MPSSLMLEVPALADFNRAWTELTDWLSLLDQVIKSQRVMVGDLEDINEMIIKQKATMQDLEQRRPQLEELITAAQNLKNKTSNQEARTIITDRIERIQNQWDEVQEHLQNRRQQLNEMLKDSTQWLEAKEEAEQVLGQARAKLESWKEGPYTVDAIQKKITETKQLAKDLRQWQTNVDVANDLALKLLRDYSADDTRKVHMITENINASWRSIHKRVSEREAALEETHRLLQQFPLDLEKFLAWLTEAETTANVLQDATRKERLLEDSKGVKELMKQWQDLQGEIEAHTDVYHNLDENSQKILRSLEGSDDAVLLQRRLDNMNFKWSELRKKSLNIRSHLEASSDQWKRLHLSLQELLVWLQLKDDELSRQAPIGGDFPAVQKQNDVHRAFKRELKTKEPVIMSTLETVRIFLTEQPLEGLEKLYQEPRELPPEERAQNVTRLLRKQAEEVNTEWEKLNLHSADWQRKIDETLERLQELQEATDELDLKLRQAEVIKGSWQPVGDLLIDSLQDHLEKVKALRGEIAPLKENVSHVNDLARQLTTLGIQLSPYNLSTLEDLNTRWKLLQVAVEDRVRQLHEAHRDFGPASQHFLSTSVQGPWERAISPNKVPYYINHETQTTCWDHPKMTELYQSLADLNNVRFSAYRTAMKLRRLQKALCLDLLSLSAACDALDQHNLKQNDQPMDILQIINCLTTIYDRLEQEHNNLVNVPLCVDMCLNWLLNVYDTGRTGRIRVLSFKTGIISLCKAHLEDKYRYLFKQVASSTGFCDQRRLGLLLHDSIQIPRQLGEVASFGGSNIEPSVRSCFQFANNKPEIEAALFLDWMRLEPQSMVWLPVLHRVAAAETAKHQAKCNICKECPIIGFRYRSLKHFNYDICQSCFFSGRVAKGHKMHYPMVEYCTPTTSGEDVRDFAKVLKNKFRTKRYFAKHPRMGYLPVQTVLEGDNMETPASSPQLSHDDTHSRIEHYASRLAEMENSNGSYLNDSISPNESIDDEHLLIQHYCQSLNQDSPLSQPRSPAQILISLESEERGELERILADLEEENRNLQAEYDRLKQQHEHKGLSPLPSPPEMMPTSPQSPRDAELIAEAKLLRQHKGRLEARMQILEDHNKQLESQLHRLRQLLEQPQAEAKVNGTTVSSPSTSLQRSDSSQPMLLRVVGSQTSDSMGEEDLLSPPQDTSTGLEEVMEQLNNSFPSSRGHNVGSLFHMADDLGRAMESLVSVMTDEEGAE

SEQ ID NO: 36 - DNA, 7048 bp, Homo sapiens
acactagcaatggcaaagctttgtgcggaggcattgctggctgctctgaactaaaagcatccgtggggaccgaaagaggtttttgcacaccttattaaggaactccaggatggcattgggcagcggcaaactgttgtcagaacattgaatgcaactggggaagaaataattcagcaatcctcaaaaacagatgccagtattctacaggaaaaattgggaagcctgaatctgcggtggcaggaggtctgcaaacagctgtcagacagaaaaaagaggctagaagaacaaaagaatatcttgtcagaatttcaaagagatttaaatgaatttgttttatggttggaggaagcagataacattgctagtatcccacttgaacctggaaaagagcagcaactaaaagaaaagcttgagcaagtcaagttactggtggaagagttgcccctgcgccagggaattctcaaacaattaaatgaaactggaggacccgtgcttgtaagtgctcccataagcccagaagagcaagataaacttgaaaataagctcaagcagacaaatctccagtggataaaggtttccagagctttacctgagaaacaaggagaaattgaagctcaaataaaagaccttgggcagcttgaaaaaaagcttgaagaccttgaagagcagttaaatcatctgctgctgtggttatctcctattaggaatcagttggaaatttataaccaaccaaaccaagaaggaccatttgacgttcaggaaactgaaatagcagttcaagctaaacaaccggatgtggaagagattttgtctaaagggcagcatttgtacaaggaaaaaccagccactcagccagtgaagaggaagttagaagatctgagctctgagtggaaggcggtaaaccgtttacttcaagagctgagggcaaagcagcctgacctagctcctggactgaccactattggagcctctcctactcagactgttactctggtgacacaacctgtggttactaaggaaactgccatctccaaactagaaatgccatcttccttgatgttggaggtacctgctctggcagatttcaaccgggcttggacagaacttaccgactggctttctctgcttgatcaagttataaaatcacagagggtgatggtgggtgaccttgaggatatcaacgagatgatcatcaagcagaaggcaacaatgcaggatttggaacagaggcgtccccagttggaagaactcattaccgctgcccaaaatttgaaaaacaagaccagcaatcaagaggctagaacaatcattacggatcgaattgaaagaattcagaatcagtgggatgaagtacaagaacaccttcagaaccggaggcaacagttgaatgaaatgttaaaggattcaacacaatggctggaagctaaggaagaagctgagcaggtcttaggacaggccagagccaagcttgagtcatggaaggagggtccctatacagtagatgcaatccaaaagaaaatcacagaaaccaagcagttggccaaagacctccgccagtggcagacaaatgtagatgtggcaaatgacttggccctgaaacttctccgggattattctgcagatgataccagaaaagtccacatgataacagagaatatcaatgcctcttggagaagcattcataaaagggtgagtgagcgagaggctgctttggaagaaactcatagattactgcaacagttccccctggacctggaaaagtttcttgcctggcttacagaagctgaaacaactgccaatgtcctacaggatgctacccgtaaggaaaggctcctagaagactccaagggagtaaaagagctgatgaaacaatggcaagacctccaaggtgaaattgaagctcacacagatgtttatcacaacctggatgaaaacagccaaaaaatcctgagatccctggaaggttccgatgatgcagtcctgttacaaagacgtttggataacatgaacttcaagtggagtgaacttcggaaaaagtctctcaacattaggtcccatttggaagccagttctgaccagtggaagcgtctgcacctttctctgcaggaacttctggtgtggctacagctgaaagatgatgaattaagccggcaggcacctattggaggcgactttccagcagttcagaagcagaacgatgtacatagggccttcaagagggaattgaaaactaaagaacctgtaatcatgagtactcttgagactgtacgaatatttctgacagagcagcctttggaaggactagagaaactctaccaggagcccagagagctgcctcctgaggagagagcccagaatgtcactcggcttctacgaaagcaggctgaggaggtcaatactgagtgggaaaaattgaacctgcactccgctgactggcagagaaaaatagatgagacccttgaaagactccaggaacttcaagaggccacggatgagctggacctcaagctgcgccaagctgaggtgatcaagggatcctggcagcccgtgggcgatctcctcattgactctctccaagatcacctcgagaaagtcaaggcacttcgaggagaaattgcgcctctgaaagagaacgtgagccacgtcaatgaccttgctcgccagcttaccactttgggcattcagctctcaccgtataacctcagcactctggaagacctgaacaccagatggaagcttctgcaggtggccgtcgaggaccgagtcaggcagctgcatgaagcccacagggactttggtccagcatctcagcactttctttccacgtctgtccagggtccctgggagagagccatctcgccaaacaaagtgccctactatatcaaccacgagactcaaacaacttgctgggaccatcccaaaatgacagagctctaccagtctttagctgacctgaataatgtcagattctcagcttataggactgccatgaaactccgaagactgcagaaggccctttgcttggatctcttgagcctgtcagctgcatgtgatgccttggaccagcacaacctcaagcaaaatgaccagcccatggatatcctgcagattattaattgtttgaccactatttatgaccgcctggagcaagagcacaacaatttggtcaacgtccctctctgcgtggatatgtgtctgaactggctgctgaatgtttatgatacgggacgaacagggaggatccgtgtcctgtcttttaaaactggcatcatttccctgtgtaaagcacatttggaagacaagtacagataccttttcaagcaagtggcaagttcaacaggattttgtgaccagcgcaggctgggcctccttctgcatgattctatccaaattccaagacagttgggtgaagttgcatcctttgggggcagtaacattgagccaagtgtccggagctgcttccaatttgctaataataagccagagatcgaagcggccctcttcctagactggatgagactggaaccccagtccatggtgtggctgcccgtcctgcacagagtggctgctgcagaaactgccaagcatcaggccaaatgtaacatctgcaaagagtgtccaatcattggattcaggtacaggagtctaaagcactttaattatgacatctgccaaagctgctttttttctggtcgagttgcaaaaggccataaaatgcactatcccatggtggaatattgcactccgactacatcaggagaagatgttcgagactttgccaaggtactaaaaaacaaatttcgaaccaaaaggtattttgcgaagcatccccgaatgggctacctgccagtgcagactgtcttagagggggacaacatggaaacgaatctgcaagcagaatatgaccgtctaaagcagcagcacgaacataaaggcctgtccccactgccgtcccctcctgaaatgatgcccacctctccccagagtccccgggatgctgagctcattgctgaggccaagctactgcgtcaacacaaaggccgcctggaagccaggatgcaaatcctggaagaccacaataaacagctggagtcacagttacacaggctaaggcagctgctggagcaaccccaggcagaggccaaagtgaatggcacaacggtgtcctctccttctacctctctacagaggtccgacagcagtcagcctatgctgctccgagtggttggcagtcaaacttcggactccatgggtgaggaagatcttctcagtcctccccaggacacaagcacagggttagaggaggtgatggagcaactcaacaactccttccctagttcaagaggacacaatgtaggaagtcttttccacatggcagatgatttgggcagagcgatggagtccttagtatcagtcatgacagatgaagaaggagcagaataaatgttttacaactcctgattcccgcatggtttttataatattcatacaacaaagaggattagacagtaagagtttacaagaaataaatctatatttttgtgaagggtagtggtattatactgtagatttcagtagtttctaagtctgttattgttttgttaacaatggcaggttttacacgtctatgcaattgtacaaaaaagttataagaaaactacatgtaaaatcttgatagctaaataacttgccatttctttatatggaacgcattttgggttgtttaaaaatttataacagttataaagaaagattgtaaactaaagtgtgctttataaaaaaaagttgtttataaaaacccctaaaaacaaaacaaacacacacacacacacatacacacacacacacaaaactttgaggcagcgcattgttttgcatccttttggcgtgatatccatatgaaattcatggctttttctttttttgcatattaaagataagacttcctctaccaccacaccaaatgactactacacactgctcatttgagaactgtcagctgagtggggcaggcttgagttttcatttcatatatctatatgtctataagtatataaatactatagttatatagataaagagatacgaatttctatagactgactttttccattttttaaatgttcatgtcacatcctaatagaaagaaattacttctagtcagtcatccaggcttacctgcttggtctagaatggatttttcccggagccggaagccaggaggaaactacaccacactaaaacattgtctacagctccagatgtttctcattttaaacaactttccactgacaacgaaagtaaagtaaagtattggatttttttaaagggaacatgtgaatgaatacacaggacttattatatcagagtgagtaatcggttggttggttgattgattgattgattgatacattcagcttcctgctgctagcaatgccacgatttagatttaatgatgcttcagtggaaatcaatcagaaggtattctgaccttgtgaacatcagaaggtattttttaactcccaagcagtagcaggacgatgatagggctggagggctatggattcccagcccatccctgtgaaggagtaggccactctttaagtgaaggattggatgattgttcataatacataaagttctctgtaattacaactaaattattatgccctcttctcacagtcaaaaggaactgggtggtttggtttttgttgcttttttagatttattgtcccatgtgggatgagtttttaaatgccacaagacataatttaaaataaataaactttgggaaaaggtgtaaaacagtagccccatcacatttgtgatactgacaggtatcaacccagaagcccatgaactgtgtttccatcctttgcatttctctgcgagtagttccacacaggtttgtaagtaagtaagaaagaaggcaaattgattcaaatgttacaaaaaaacccttcttggtggattagacaggttaaatatataaacaaacaaacaaaaattgctcaaaaaagaggagaaaagctcaagaggaaaagctaaggactggtaggaaaaagctttactctttcatgccattttatttctttttgatttttaaatcattcattcaatagataccaccgtgtgacctataattttgcaaatctgttacctctgacatcaagtgtaattagcttttggagagtgggctgacatcaagtgtaattagcttttggagagtgggttttgtccattattaataattaattaattaacatcaaacacggcttctcatgctatttctacctcactttggttttggggtgttcctgataattgtgcacacctgagttcacagcttcaccacttgtccattgcgttattttctttttcctttataattctttctttttccttcataattttcaaaagaaaacccaaagctctaaggtaacaaattaccaaattacatgaagatttggtttttgtcttgcatttttttcctttatgtgacgctggaccttttctttacccaaggatttttaaaactcagatttaaaacaaggggttactttacatcctactaagaagtttaagtaagtaagtttcattctaaaatcagaggtaaatagagtgcataaataattttgttttaatctttttgtttttcttttagacacattagctctggagtgagtctgtcataatatttgaacaaaaattgagagctttattgctgcattttaagcataattaatttggacattatttcgtgttgtgttctttataaccaccaagtattaaactgtaaatcataatgtaactgaagcataaacatcacatggcatgttttgtcattgttttcaggtactgagttcttacttgagtatcataatatattgtgttttaacaccaacactgtaacatttacgaattatttttttaaacttcagttttactgcattttcacaacatatcagacttcaccaaatatatgccttactattgtattatagtactgctttactgtgtatctcaataaagcacgcagttatgttac

SEQ ID NO: 37 - protein, 1133 aa, Homo sapiens
MPSSLMLEVPALADFNRAWTELTDWLSLLDQVIKSQRVMVGDLEDINEMIIKQKATMQDLEQRRPQLEELITAAQNLKNKTSNQEARTIITDRIERIQNQWDEVQEHLQNRRQQLNEMLKDSTQWLEAKEEAEQVLGQARAKLESWKEGPYTVDAIQKKITETKQLAKDLRQWQTNVDVANDLALKLLRDYSADDTRKVHMITENINASWRSIHKRVSEREAALEETHRLLQQFPLDLEKFLAWLTEAETTANVLQDATRKERLLEDSKGVKELMKQWQDLQGEIEAHTDVYHNLDENSQKILRSLEGSDDAVLLQRRLDNMNFKWSELRKKSLNIRSHLEASSDQWKRLHLSLQELLVWLQLKDDELSRQAPIGGDFPAVQKQNDVHRAFKRELKTKEPVIMSTLETVRIFLTEQPLEGLEKLYQEPRELPPEERAQNVTRLLRKQAEEVNTEWEKLNLHSADWQRKIDETLERLQELQEATDELDLKLRQAEVIKGSWQPVGDLLIDSLQDHLEKVKALRGEIAPLKENVSHVNDLARQLTTLGIQLSPYNLSTLEDLNTRWKLLQVAVEDRVRQLHEAHRDFGPASQHFLSTSVQGPWERAISPNKVPYYINHETQTTCWDHPKMTELYQSLADLNNVRFSAYRTAMKLRRLQKALCLDLLSLSAACDALDQHNLKQNDQPMDILQIINCLTTIYDRLEQEHNNLVNVPLCVDMCLNWLLNVYDTGRTGRIRVLSFKTGIISLCKAHLEDKYRYLFKQVASSTGFCDQRRLGLLLHDSIQIPRQLGEVASFGGSNIEPSVRSCFQFANNKPEIEAALFLDWMRLEPQSMVWLPVLHRVAAAETAKHQAKCNICKECPIIGFRYRSLKHFNYDICQSCFFSGRVAKGHKMHYPMVEYCTPTTSGEDVRDFAKVLKNKFRTKRYFAKHPRMGYLPVQTVLEGDNMETNLQAEYDRLKQQHEHKGLSPLPSPPEMMPTSPQSPRDAELIAEAKLLRQHKGRLEARMQILEDHNKQLESQLHRLRQLLEQPQAEAKVNGTTVSSPSTSLQRSDSSQPMLLRVVGSQTSDSMGEEDLLSPPQDTSTGLEEVMEQLNNSFPSSRGHNVGSLFHMADDLGRAMESLVSVMTDEEGAE

SEQ ID NO: 38 - DNA, 13897 bp, Homo sapiens
acctaacctaacttgaatcatgcgaaaggggagctgttggaattcaaatagactttctggttcccagcagtcggcagtaatagaatgctttcaggaagatgacagaatcaggagaaagatgctgttttgcactatcttgatttgttacagcagccaacttattggcatgatggagtgacaggaaaaacagctggcatggaagatgaaagagaagatgttcaaaagaaaacattcacaaaatgggtaaatgcacaattttctaagtttgggaagcagcatattgagaacctcttcagtgacctacaggatgggaggcgcctcctagacctcctcgaaggcctgacagggcaaaaactgccaaaagaaaaaggatccacaagagttcatgccctgaacaatgtcaacaaggcactgcgggttttgcagaacaataatgttgatttagtgaatattggaagtactgacatcgtagatggaaatcataaactgactcttggtttgatttggaatataatcctccactggcaggtcaaaaatgtaatgaaaaatatcatggctggattgcaacaaaccaacagtgaaaagattctcctgagctgggtccgacaatcaactcgtaattatccacaggttaatgtaatcaacttcaccaccagctggtctgatggcctggctttgaatgctctcatccatagtcataggccagacctatttgactggaatagtgtggtttgccagcagtcagccacacaacgactggaacatgcattcaacatcgccagatatcaattaggcatagagaaactactcgatcctgaagatgttgataccacctatccagataagaagtccatcttaatgtacatcacatcactcttccaagttttgcctcaacaagtgagcattgaagccatccaggaagtggaaatgttgccaaggccacctaaagtgactaaagaagaacattttcagttacatcatcaaatgcactattctcaacagatcacggtcagtctagcacagggatatgagagaacttcttcccctaagcctcgattcaagagctatgcctacacacaggctgcttatgtcaccacctctgaccctacacggagcccatttccttcacagcatttggaagctcctgaagacaagtcatttggcagttcattgatggagagtgaagtaaacctggaccgttatcaaacagctttagaagaagtattatcgtggcttctttctgctgaggacacattgcaagcacaaggagagatttctaatgatgtggaagtggtgaaagaccagtttcatactcatgaggggtacatgatggatttgacagcccatcagggccgggttggtaatattctacaattgggaagtaagctgattggaacaggaaaattatcagaagatgaagaaactgaagtacaagagcagatgaatctcctaaattcaagatgggaatgcctcagggtagctagcatggaaaaacaaagcaatttacatagagttttaatggatctccagaatcagaaactgaaagagttgaatgactggctaacaaaaacagaagaaagaacaaggaaaatggaggaagagcctcttggacctgatcttgaagacctaaaacgccaagtacaacaacataaggtgcttcaagaagatctagaacaagaacaagtcagggtcaattctctcactcacatggtggtggtagttgatgaatctagtggagatcacgcaactgctgctttggaagaacaacttaaggtattgggagatcgatgggcaaacatctgtagatggacagaagaccgctgggttcttttacaagacatccttctcaaatggcaacgtcttactgaagaacagtgcctttttagtgcatggctttcagaaaaagaagatgcagtgaacaagattcacacaactggctttaaagatcaaaatgaaatgttatcaagtcttcaaaaactggccgttttaaaagcggatctagaaaagaaaaagcaatccatgggcaaactgtattcactcaaacaagatcttctttcaacactgaagaataagtcagtgacccagaagacggaagcatggctggataactttgcccggtgttgggataatttagtccaaaaacttgaaaagagtacagcacagatttcacaggctgtcaccaccactcagccatcactaacacagacaactgtaatggaaacagtaactacggtgaccacaagggaacagatcctggtaaagcatgctcaagaggaacttccaccaccacctccccaaaagaagaggcagattactgtggattctgaaattaggaaaaggttggatgttgatataactgaacttcacagctggattactcgctcagaagctgtgttgcagagtcctgaatttgcaatctttcggaaggaaggcaacttctcagacttaaaagaaaaagtcaatgccatagagcgagaaaaagctgagaagttcagaaaactgcaagatgccagcagatcagctcaggccctggtggaacagatggtgaatgagggtgttaatgcagatagcatcaaacaagcctcagaacaactgaacagccggtggatcgaattctgccagttgctaagtgagagacttaactggctggagtatcagaacaacatcatcgctttctataatcagctacaacaattggagcagatgacaactactgctgaaaactggttgaaaatccaacccaccaccccatcagagccaacagcaattaaaagtcagttaaaaatttgtaaggatgaagtcaaccggctatcagatcttcaacctcaaattgaacgattaaaaattcaaagcatagccctgaaagagaaaggacaaggacccatgttcctggatgcagactttgtggcctttacaaatcattttaagcaagtcttttctgatgtgcaggccagagagaaagagctacagacaatttttgacactttgccaccaatgcgctatcaggagaccatgagtgccatcaggacatgggtccagcagtcagaaaccaaactctccatacctcaacttagtgtcaccgactatgaaatcatggagcagagactcggggaattgcaggctttacaaagttctctgcaagagcaacaaagtggcctatactatctcagcaccactgtgaaagagatgtcgaagaaagcgccctctgaaattagccggaaatatcaatcagaatttgaagaaattgagggacgctggaagaagctctcctcccagctggttgagcattgtcaaaagctagaggagcaaatgaataaactccgaaaaattcagaatcacatacaaaccctgaagaaatggatggctgaagttgatgtttttctgaaggaggaatggcctgcccttggggattcagaaattctaaaaaagcagctgaaacagtgcagacttttagtcagtgatattcagacaattcagcccagtctaaacagtgtcaatgaaggtgggcagaagataaagaatgaagcagagccagagtttgcttcgagacttgagacagaactcaaagaacttaacactcagtgggatcacatgtgccaacaggtctatgccagaaaggaggccttgaagggaggtttggagaaaactgtaagcctccagaaagatctatcagagatgcacgaatggatgacacaagctgaagaagagtatcttgagagagattttgaatataaaactccagatgaattacagaaagcagttgaagagatgaagagagctaaagaagaggcccaacaaaaagaagcgaaagtgaaactccttactgagtctgtaaatagtgtcatagctcaagctccacctgtagcacaagaggccttaaaaaaggaacttgaaactctaaccaccaactaccagtggctctgcactaggctgaatgggaaatgcaagactttggaagaagtttgggcatgttggcatgagttattgtcatacttggagaaagcaaacaagtggctaaatgaagtagaatttaaacttaaaaccactgaaaacattcctggcggagctgaggaaatctctgaggtgctagattcacttgaaaatttgatgcgacattcagaggataacccaaatcagattcgcatattggcacagaccctaacagatggcggagtcatggatgagctaatcaatgaggaacttgagacatttaattctcgttggagggaactacatgaagaggctgtaaggaggcaaaagttgcttgaacagagcatccagtctgcccaggagactgaaaaatccttacacttaatccaggagtccctcacattcattgacaagcagttggcagcttatattgcagacaaggtggacgcagctcaaatgcctcaggaagcccagaaaatccaatctgatttgacaagtcatgagatcagtttagaagaaatgaagaaacataatcaggggaaggaggctgcccaaagagtcctgtctcagattgatgttgcacagaaaaaattacaagatgtctccatgaagtttcgattattccagaaaccagccaattttgagcagcgtctacaagaaagtaagatgattttagatgaagtgaagatgcacttgcctgcattggaaacaaagagtgtggaacaggaagtagtacagtcacagctaaatcattgtgtgaacttgtataaaagtctgagtgaagtgaagtctgaagtggaaatggtgataaagactggacgtcagattgtacagaaaaagcagacggaaaatcccaaagaacttgatgaaagagtaacagctttgaaattgcattataatgagctgggagcaaaggtaacagaaagaaagcaacagttggagaaatgcttgaaattgtcccgtaagatgcgaaaggaaatgaatgtcttgacagaatggctggcagctacagatatggaattgacaaagagatcagcagttgaaggaatgcctagtaatttggattctgaagttgcctggggaaaggctactcaaaaagagattgagaaacagaaggtgcacctgaagagtatcacagaggtaggagaggccttgaaaacagttttgggcaagaaggagacgttggtggaagataaactcagtcttctgaatagtaactggatagctgtcacctcccgagcagaagagtggttaaatcttttgttggaataccagaaacacatggaaacttttgaccagaatgtggaccacatcacaaagtggatcattcaggctgacacacttttggatgaatcagagaaaaagaaaccccagcaaaaagaagacgtgcttaagcgtttaaaggcagaactgaatgacatacgcccaaaggtggactctacacgtgaccaagcagcaaacttgatggcaaaccgcggtgaccactgcaggaaattagtagagccccaaatctcagagctcaaccatcgatttgcagccatttcacacagaattaagactggaaaggcctccattcctttgaaggaattggagcagtttaactcagatatacaaaaattgcttgaaccactggaggctgaaattcagcagggggtgaatctgaaagaggaagacttcaataaagatatgaatgaagacaatgagggtactgtaaaagaattgttgcaaagaggagacaacttacaacaaagaatcacagatgagagaaagcgagaggaaataaagataaaacagcagctgttacagacaaaacataatgctctcaaggatttgaggtctcaaagaagaaaaaaggctctagaaatttctcatcagtggtatcagtacaagaggcaggctgatgatctcctgaaatgcttggatgacattgaaaaaaaattagccagcctacctgagcccagagatgaaaggaaaataaaggaaattgatcgggaattgcagaagaagaaagaggagctgaatgcagtgcgtaggcaagctgagggcttgtctgaggatggggccgcaatggcagtggagccaactcagatccagctcagcaagcgctggcgggaaattgagagcaaatttgctcagtttcgaagactcaactttgcacaaattcacactgtccgtgaagaaacgatgatggtgatgactgaagacatgcctttggaaatttcttatgtgccttctacttatttgactgaaatcactcatgtctcacaagccctattagaagtggaacaacttctcaatgctcctgacctctgtgctaaggactttgaagatctctttaagcaagaggagtctctgaagaatataaaagatagtctacaacaaagctcaggtcggattgacattattcatagcaagaagacagcagcattgcaaagtgcaacgcctgtggaaagggtgaagctacaggaagctctctcccagcttgatttccaatgggaaaaagttaacaaaatgtacaaggaccgacaagggcgatttgacagatctgttgagaaatggcggcgttttcattatgatataaagatatttaatcagtggctaacagaagctgaacagtttctcagaaagacacaaattcctgagaattgggaacatgctaaatacaaatggtatcttaaggaactccaggatggcattgggcagcggcaaactgttgtcagaacattgaatgcaactggggaagaaataattcagcaatcctcaaaaacagatgccagtattctacaggaaaaattgggaagcctgaatctgcggtggcaggaggtctgcaaacagctgtcagacagaaaaaagaggctagaagaacaaaagaatatcttgtcagaatttcaaagagatttaaatgaatttgttttatggttggaggaagcagataacattgctagtatcccacttgaacctggaaaagagcagcaactaaaagaaaagcttgagcaagtcaagttactggtggaagagttgcccctgcgccagggaattctcaaacaattaaatgaaactggaggacccgtgcttgtaagtgctcccataagcccagaagagcaagataaacttgaaaataagctcaagcagacaaatctccagtggataaaggtttccagagctttacctgagaaacaaggagaaattgaagctcaaataaaagaccttgggcagcttgaaaaaaagcttgaagaccttgaagagcagttaaatcatctgctgctgtggttatctcctattaggaatcagttggaaatttataaccaaccaaaccaagaaggaccatttgacgttaaggaaactgaaatagcagttcaagctaaacaaccggatgtggaagagattttgtctaaagggcagcatttgtacaaggaaaaaccagccactcagccagtgaagaggaagttagaagatctgagctctgagtggaaggcggtaaaccgtttacttcaagagctgagggcaaagcagcctgacctagctcctggactgaccactattggagcctctcctactcagactgttactctggtgacacaacctgtggttactaaggaaactgccatctccaaactagaaatgccatcttccttgatgttggaggtacctgctctggcagatttcaaccgggcttggacagaacttaccgactggctttctctgcttgatcaagttataaaatcacagagggtgatggtgggtgaccttgaggatatcaacgagatgatcatcaagcagaaggcaacaatgcaggatttggaacagaggcgtccccagttggaagaactcattaccgctgcccaaaatttgaaaaacaagaccagcaatcaagaggctagaacaatcattacggatcgaattgaaagaattcagaatcagtgggatgaagtacaagaacaccttcagaaccggaggcaacagttgaatgaaatgttaaaggattcaacacaatggctggaagctaaggaagaagctgagcaggtcttaggacaggccagagccaagcttgagtcatggaaggagggtccctatacagtagatgcaatccaaaagaaaatcacagaaaccaagcagttggccaaagacctccgccagtggcagacaaatgtagatgtggcaaatgacttggccctgaaacttctccgggattattctgcagatgataccagaaaagtccacatgataacagagaatatcaatgcctcttggagaagcattcataaaagggtgagtgagcgagaggctgctttggaagaaactcatagattactgcaacagttccccctggacctggaaaagtttcttgcctggcttacagaagctgaaacaactgccaatgtcctacaggatgctacccgtaaggaaaggctcctagaagactccaagggagtaaaagagctgatgaaacaatggcaagacctccaaggtgaaattgaagctcacacagatgtttatcacaacctggatgaaaacagccaaaaaatcctgagatccctggaaggttccgatgatgcagtcctgttacaaagacgtttggataacatgaacttcaagtggagtgaacttcggaaaaagtctctcaacattaggtcccatttggaagccagttctgaccagtggaagcgtctgcacctttctctgcaggaacttctggtgtggctacagctgaaagatgatgaattaagccggcaggcacctattggaggcgactttccagcagttcagaagcagaacgatgtacatagggccttcaagagggaattgaaaactaaagaacctgtaatcatgagtactcttgagactgtacgaatatttctgacagagcagcctttggaaggactagagaaactctaccaggagcccagagagctgcctcctgaggagagagcccagaatgtcactcggcttctacgaaagcaggctgaggaggtcaatactgagtgggaaaaattgaacctgcactccgctgactggcagagaaaaatagatgagacccttgaaagactccgggaacttcaagaggccacggatgagctggacctcaagctgcgccaagctgaggtgatcaagggatcctggcagcccgtgggcgatctcctcattgactctctccaagatcacctcgagaaagtcaaggcacttcgaggagaaattgcgcctctgaaagagaacgtgagccacgtcaatgaccttgctcgccagcttaccactttgggcattcagctctcaccgtataacctcagcactctggaagacctgaacaccagatggaagcttctgcaggtggccgtcgaggaccgagtcaggcagctgcatgaagcccacagggactttggtccagcatctcagcactttctttccacgtctgtccagggtccctgggagagagccatctcgccaaacaaagtgccctactatatcaaccacgagactcaaacaacttgctgggaccatcccaaaatgacagagctctaccagtctttagctgacctgaataatgtcagattctcagcttataggactgccatgaaactccgaagactgcagaaggccctttgcttggatctcttgagcctgtcagctgcatgtgatgccttggaccagcacaacctcaagcaaaatgaccagcccatggatatcctgcagattattaattgtttgaccactatttatgaccgcctggagcaagagcacaacaatttggtcaacgtccctctctgcgtggatatgtgtctgaactggctgctgaatgtttatgatacgggacgaacagggaggatccgtgtcctgtcttttaaaactggcatcatttccctgtgtaaagcacatttggaagacaagtacagataccttttcaagcaagtggcaagttcaacaggattttgtgaccagcgcaggctgggcctccttctgcatgattctatccaaattccaagacagttgggtgaagttgcatcctttgggggcagtaacattgagccaagtgtccggagctgcttccaatttgctaataataagccagagatcgaagcggccctcttcctagactggatgagactggaaccccagtccatggtgtggctgcccgtcctgcacagagtggctgctgcagaaactgccaagcatcaggccaaatgtaacatctgcaaagagtgtccaatcattggattcaggtacaggagtctaaagcactttaattatgacatctgccaaagctgctttttttctggtcgagttgcaaaaggccataaaatgcactatcccatggtggaatattgcactccgactacatcaggagaagatgttcgagactttgccaaggtactaaaaaacaaatttcgaaccaaaaggtattttgcgaagcatccccgaatgggctacctgccagtgcagactgtcttagagggggacaacatggaaactcccgttactctgatcaacttctggccagtagattctgcgcctgcctcgtcccctcagctttcacacgatgatactcattcacgcattgaacattatgctagcaggctagcagaaatggaaaacagcaatggatcttatctaaatgatagcatctctcctaatgagagcatagatgatgaacatttgttaatccagcattactgccaaagtttgaaccaggactcccccctgagccagcctcgtagtcctgcccagatcttgatttccttagagagtgaggaaagaggggagctagagagaatcctagcagatcttgaggaagaaaacaggaatctgcaagcagaatatgaccgtctaaagcagcagcacgaacataaaggcctgtccccactgccgtcccctcctgaaatgatgcccacctctccccagagtccccgggatgctgagctcattgctgaggccaagctactgcgtcaacacaaaggccgcctggaagccaggatgcaaatcctggaagaccacaataaacagctggagtcacagttacacaggctaaggcagctgctggagcaaccccaggcagaggccaaagtgaatggcacaacggtgtcctctccttctacctctctacagaggtccgacagcagtcagcctatgctgctccgagtggttggcagtcaaacttcggactccatgggtgaggaagatcttctcagtcctccccaggacacaagcacagggttagaggaggtgatggagcaactcaacaactccttccctagttcaagaggacacaatgtaggaagtcttttccacatggcagatgatttgggcagagcgatggagtccttagtatcagtcatgacagatgaagaaggagcagaataaatgttttacaactcctgattcccgcatggtttttataatattcatacaacaaagaggattagacagtaagagtttacaagaaataaatctatatttttgtgaagggtagtggtattatactgtagatttcagtagtttctaagtctgttattgttttgttaacaatggcaggttttacacgtctatgcaattgtacaaaaaagttataagaaaactacatgtaaaatcttgatagctaaataacttgccatttctttatatggaacgcattttgggttgtttaaaaatttataacagttataaagaaagattgtaaactaaagtgtgctttataaaaaaaagttgtttataaaaacccctaaaaacaaaacaaacacacacacacacacatacacacacacacacaaaactttgaggcagcgcattgttttgcatccttttggcgtgatatccatatgaaattcatggctttttctttttttgcatattaaagataagacttcctctaccaccacaccaaatgactactacacactgctcatttgagaactgtcagctgagtggggcaggcttgagttttcatttcatatatctatatgtctataagtatataaatactatagttatatagataaagagatacgaatttctatagactgactttttccattttttaaatgttcatgtcacatcctaatagaaagaaattacttctagtcagtcatccaggcttacctgcttggtctagaatggatttttcccggagccggaagccaggaggaaactacaccacactaaaacattgtctacagctccagatgtttctcattttaaacaactttccactgacaacgaaagtaaagtaaagtattggatttttttaaagggaacatgtgaatgaatacacaggacttattatatcagagtgagtaatcggttggttggttgattgattgattgattgatacattcagcttcctgctgctagcaatgccacgatttagatttaatgatgcttcagtggaaatcaatcagaaggtattctgaccttgtgaacatcagaaggtattttttaactcccaagcagtagcaggacgatgatagggctggagggctatggattcccagcccatccctgtgaaggagtaggccactctttaagtgaaggattggatgattgttcataatacataaagttctctgtaattacaactaaattattatgccctcttctcacagtcaaaaggaactgggtggtttggtttttgttgcttttttagatttattgtcccatgtgggatgagtttttaaatgccacaagacataatttaaaataaataaactttgggaaaaggtgtaaaacagtagccccatcacatttgtgatactgacaggtatcaacccagaagcccatgaactgtgtttccatcctttgcatttctctgcgagtagttccacacaggtttgtaagtaagtaagaaagaaggcaaattgattcaaatgttacaaaaaaacccttcttggtggattagacaggttaaatatataaacaaacaaacaaaaattgctcaaaaaagaggagaaaagctcaagaggaaaagctaaggactggtaggaaaaagctttactctttcatgccattttatttctttttgatttttaaatcattcattcaatagataccaccgtgtgacctataattttgcaaatctgttacctctgacatcaagtgtaattagcttttggagagtgggctgacatcaagtgtaattagcttttggagagtgggttttgtccattattaataattaattaattaacatcaaacacggcttctcatgctatttctacctcactttggttttggggtgttcctgataattgtgcacacctgagttcacagcttcaccacttgtccattgcgttattttctttttcctttataattctttctttttccttcataattttcaaaagaaaacccaaagctctaaggtaacaaattaccaaattacatgaagatttggtttttgtcttgcatttttttcctttatgtgacgctggaccttttctttacccaaggatttttaaaactcagatttaaaacaaggggttactttacatcctactaagaagtttaagtaagtaagtttcattctaaaatcagaggtaaatagagtgcataaataattttgttttaatctttttgtttttcttttagacacattagctctggagtgagtctgtcataatatttgaacaaaaattgagagctttattgctgcattttaagcataattaatttggacattatttcgtgttgtgttctttataaccaccaagtattaaactgtaaatcataatgtaactgaagcataaacatcacatggcatgttttgtcattgttttcaggtactgagttcttacttgagtatcataatatattgtgttttaacaccaacactgtaacatttacgaattatttttttaaacttcagttttactgcattttcacaacatatcagacttcaccaaatatatgccttactattgtattatagtactgctttactgtgtatctcaataaagcacgcagttatgttacaaaaaagta

SEQ ID NO: 39 - protein, 3695 aa, Homo sapiens
MEDEREDVQKKTFTKWVNAQFSKFGKQHIENLFSDLQDGRRLLDLLEGLTGQKLPKEKGSTRVHALNNVNKALRVLQNNNVDLVNIGSTDIVDGNHKLTLGLIWNIILHWQVKNVMKNIMAGLQQTNSEKILLSWVRQSTRNYPQVNVINFTTSWSDGLALNALIHSHRPDLFDWNSVVCQQSATQRLEHAFNIARYQLGIEKLLDPEDVDTTYPDKKSILMYITSLFQVLPQQVSIEAIQEVEMLPRPPKVTKEEHFQLHHQMHYSQQITVSLAQGYERTSSPKPRFKSYAYTQAAYVTTSDPTRSPFPSQHLEAPEDKSFGSSLMESEVNLDRYQTALEEVLSWLLSAEDTLQAQGEISNDVEVVKDQFHTHEGYMMDLTAHQGRVGNILQLGSKLIGTGKLSEDEETEVQEQMNLLNSRWECLRVASMEKQSNLHRVLMDLQNQKLKELNDWLTKTEERTRKMEEEPLGPDLEDLKRQVQQHKVLQEDLEQEQVRVNSLTHMVVVVDESSGDHATAALEEQLKVLGDRWANICRWTEDRWVLLQDILLKWQRLTEEQCLFSAWLSEKEDAVNKIHTTGFKDQNEMLSSLQKLAVLKADLEKKKQSMGKLYSLKQDLLSTLKNKSVTQKTEAWLDNFARCWDNLVQKLEKSTAQISQAVTTTQPSLTQTTVMETVTTVTTREQILVKHAQEELPPPPPQKKRQITVDSEIRKRLDVDITELHSWITRSEAVLQSPEFAIFRKEGNFSDLKEKVNAIEREKAEKFRKLQDASRSAQALVEQMVNEGVNADSIKQASEQLNSRWIEFCQLLSERLNWLEYQNNIIAFYNQLQQLEQMTTTAENWLKIQPTTPSEPTAIKSQLKICKDEVNRLSDLQPQIERLKIQSIALKEKGQGPMFLDADFVAFTNHFKQVFSDVQAREKELQTIFDTLPPMRYQETMSAIRTWVQQSETKLSIPQLSVTDYEIMEQRLGELQALQSSLQEQQSGLYYLSTTVKEMSKKAPSEISRKYQSEFEEIEGRWKKLSSQLVEHCQKLEEQMNKLRKIQNHIQTLKKWMAEVDVFLKEEWPALGDSEILKKQLKQCRLLVSDIQTIQPSLNSVNEGGQKIKNEAEPEFASRLETELKELNTQWDHMCQQVYARKEALKGGLEKTVSLQKDLSEMHEWMTQAEEEYLERDFEYKTPDELQKAVEEMKRAKEEAQQKEAKVKLLTESVNSVIAQAPPVAQEALKKELETLTTNYQWLCTRLNGKCKTLEEVWACWHELLSYLEKANKWLNEVEFKLKTTENIPGGAEEISEVLDSLENLMRHSEDNPNQIRILAQTLTDGGVMDELINEELETFNSRWRELHEEAVRRQKLLEQSIQSAQETEKSLHLIQESLTFIDKQLAAYIADKVDAAQMPQEAQKIQSDLTSHEISLEEMKKHNQGKEAAQRVLSQIDVAQKKLQDVSMKFRLFQKPANFEQRLQESKMILDEVKMHLPALETKSVEQEVVQSQLNHCVNLYKSLSEVKSEVEMVIKTGRQIVQKKQTENPKELDERVTALKLHYNELGAKVTERKQQLEKCLKLSRKMRKEMNVLTEWLAATDMELTKRSAVEGMPSNLDSEVAWGKATQKEIEKQKVHLKSITEVGEALKTVLGKKETLVEDKLSLLNSNWIAVTSRAEEWLNLLLEYQKHMETFDQNVDHITKWIIQADTLLDESEKKKPQQKEDVLKRLKAELNDIRPKVDSTRDQAANLMANRGDHCRKLVEPQISELNHRFAAISHRIKTGKASIPLKELEQFNSDIQKLLEPLEAEIQQGVNLKEEDFNKDMNEDNEGTVKELLQRGDNLQQRITDERKREEIKIKQQLLQTKHNALKDLRSQRRKKALEISHQWYQYKRQADDLLKCLDDIEKKLASLPEPRDERKIKEIDRELQKKKEELNAVRRQAEGLSEDGAAMAVEPTQIQLSKRWREIESKFAQFRRLNFAQIHTVREETMMVMTEDMPLEISYVPSTYLTEITHVSQALLEVEQLLNAPDLCAKDFEDLFKQEESLKNIKDSLQQSSGRIDIIHSKKTAALQSATPVERVKLQEALSQLDFQWEKVNKMYKDRQGRFDRSVEKWRRFHYDIKIFNQWLTEAEQFLRKTQIPENWEHAKYKWYLKELQDGIGQRQTVVRTLNATGEEIIQQSSKTDASILQEKLGSLNLRWQEVCKQLSDRKKRLEEQKNILSEFQRDLNEFVLWLEEADNIASIPLEPGKEQQLKEKLEQVKLLVEELPLRQGILKQLNETGGPVLVSAPISPEEQDKLENKLKQTNLQWIKVSRALPEKQGEIEAQIKDLGQLEKKLEDLEEQLNHLLLWLSPIRNQLEIYNQPNQEGPFDVKETEIAVQAKQPDVEEILSKGQHLYKEKPATQPVKRKLEDLSSEWKAVNRLLQELRAKQPDLAPGLTTIGASPTQTVTLVTQPVVTKETAISKLEMPSSLMLEVPALADFNRAWTELTDWLSLLDQVIKSQRVMVGDLEDINEMIIKQKATMQDLEQRRPQLEELITAAQNLKNKTSNQEARTIITDRIERIQNQWDEVQEHLQNRRQQLNEMLKDSTQWLEAKEEAEQVLGQARAKLESWKEGPYTVDAIQKKITETKQLAKDLRQWQTNVDVANDLALKLLRDYSADDTRKVHMITENINASWRSIHKRVSEREAALEETHRLLQQFPLDLEKFLAWLTEAETTANVLQDATRKERLLEDSKGVKELMKQWQDLQGEIEAHTDVYHNLDENSQKILRSLEGSDDAVLLQRRLDNMNFKWSELRKKSLNIRSHLEASSDQWKRLHLSLQELLVWLQLKDDELSRQAPIGGDFPAVQKQNDVHRAFKRELKTKEPVIMSTLETVRIFLTEQPLEGLEKLYQEPRELPPEERAQNVTRLLRKQAEEVNTEWEKLNLHSADWQRKIDETLERLRELQEATDELDLKLRQAEVIKGSWQPVGDLLIDSLQDHLEKVKALRGEIAPLKENVSHVNDLARQLTTLGIQLSPYNLSTLEDLNTRWKLLQVAVEDRVRQLHEAHRDFGPASQHFLSTSVQGPWERAISPNKVPYYINHETQTTCWDHPKMTELYQSLADLNNVRFSAYRTAMKLRRLQKALCLDLLSLSAACDALDQHNLKQNDQPMDILQIINCLTTIYDRLEQEHNNLVNVPLCVDMCLNWLLNVYDTGRTGRIRVLSFKTGIISLCKAHLEDKYRYLFKQVASSTGFCDQRRLGLLLHDSIQIPRQLGEVASFGGSNIEPSVRSCFQFANNKPEIEAALFLDWMRLEPQSMVWLPVLHRVAAAETAKHQAKCNICKECPIIGFRYRSLKHFNYDICQSCFFSGRVAKGHKMHYPMVEYCTPTTSGEDVRDFAKVLKNKFRTKRYFAKHPRMGYLPVQTVLEGDNMETPVTLINFWPVDSAPASSPQLSHDDTHSRIEHYASRLAEMENSNGSYLNDSISPNESIDDEHLLIQHYCQSLNQDSPLSQPRSPAQILISLESEERGELERILADLEEENRNLQAEYDRLKQQHEHKGLSPLPSPPEMMPTSPQSPRDAELIAEAKLLRQHKGRLEARMQILEDHNKQLESQLHRLRQLLEQPQAEAKVNGTTVSSPSTSLQRSDSSQPMLLRVVGSQTSDSMGEEDLLSPPQDTSTGLEEVMEQLNNSFPSSRGHNVGSLFHMADDLGRAMESLVSVMTDEEGAE

SEQ ID NO: 40 - DNA, 13800 bp, Homo sapiens
actttccccctacaggactcagatctgggaggcaattaccttcggagaaaaacgaataggaaaaactgaagtgttactttttttaaagctgctgaagtttgttggtttctcattgtttttaagcctactggagcaataaagtttgaagaacttttaccaggttttttttatcgctgccttgatatacacttttcaaaatgctttggtgggaagaagtagaggactgttatgaaagagaagatgttcaaaagaaaacattcacaaaatgggtaaatgcacaattttctaagtttgggaagcagcatattgagaacctcttcagtgacctacaggatgggaggcgcctcctagacctcctcgaaggcctgacagggcaaaaactgccaaaagaaaaaggatccacaagagttcatgccctgaacaatgtcaacaaggcactgcgggttttgcagaacaataatgttgatttagtgaatattggaagtactgacatcgtagatggaaatcataaactgactcttggtttgatttggaatataatcctccactggcaggtcaaaaatgtaatgaaaaatatcatggctggattgcaacaaaccaacagtgaaaagattctcctgagctgggtccgacaatcaactcgtaattatccacaggttaatgtaatcaacttcaccaccagctggtctgatggcctggctttgaatgctctcatccatagtcataggccagacctatttgactggaatagtgtggtttgccagcagtcagccacacaacgactggaacatgcattcaacatcgccagatatcaattaggcatagagaaactactcgatcctgaagatgttgataccacctatccagataagaagtccatcttaatgtacatcacatcactcttccaagttttgcctcaacaagtgagcattgaagccatccaggaagtggaaatgttgccaaggccacctaaagtgactaaagaagaacattttcagttacatcatcaaatgcactattctcaacagatcacggtcagtctagcacagggatatgagagaacttcttcccctaagcctcgattcaagagctatgcctacacacaggctgcttatgtcaccacctctgaccctacacggagcccatttccttcacagcatttggaagctcctgaagacaagtcatttggcagttcattgatggagagtgaagtaaacctggaccgttatcaaacagctttagaagaagtattatcgtggcttctttctgctgaggacacattgcaagcacaaggagagatttctaatgatgtggaagtggtgaaagaccagtttcatactcatgaggggtacatgatggatttgacagcccatcagggccgggttggtaatattctacaattgggaagtaagctgattggaacaggaaaattatcagaagatgaagaaactgaagtacaagagcagatgaatctcctaaattcaagatgggaatgcctcagggtagctagcatggaaaaacaaagcaatttacatagagttttaatggatctccagaatcagaaactgaaagagttgaatgactggctaacaaaaacagaagaaagaacaaggaaaatggaggaagagcctcttggacctgatcttgaagacctaaaacgccaagtacaacaacataaggtgcttcaagaagatctagaacaagaacaagtcagggtcaattctctcactcacatggtggtggtagttgatgaatctagtggagatcacgcaactgctgctttggaagaacaacttaaggtattgggagatcgatgggcaaacatctgtagatggacagaagaccgctgggttcttttacaagacatccttctcaaatggcaacgtcttactgaagaacagtgcctttttagtgcatggctttcagaaaaagaagatgcagtgaacaagattcacacaactggctttaaagatcaaaatgaaatgttatcaagtcttcaaaaactggccgttttaaaagcggatctagaaaagaaaaagcaatccatgggcaaactgtattcactcaaacaagatcttctttcaacactgaagaataagtcagtgacccagaagacggaagcatggctggataactttgcccggtgttgggataatttagtccaaaaacttgaaaagagtacagcacagatttcacaggctgtcaccaccactcagccatcactaacacagacaactgtaatggaaacagtaactacggtgaccacaagggaacagatcctggtaaagcatgctcaagaggaacttccaccaccacctccccaaaagaagaggcagattactgtggattctgaaattaggaaaaggttggatgttgatataactgaacttcacagctggattactcgctcagaagctgtgttgcagagtcctgaatttgcaatctttcggaaggaaggcaacttctcagacttaaaagaaaaagtcaatgccatagagcgagaaaaagctgagaagttcagaaaactgcaagatgccagcagatcagctcaggccctggtggaacagatggtgaatgagggtgttaatgcagatagcatcaaacaagcctcagaacaactgaacagccggtggatcgaattctgccagttgctaagtgagagacttaactggctggagtatcagaacaacatcatcgctttctataatcagctacaacaattggagcagatgacaactactgctgaaaactggttgaaaatccaacccaccaccccatcagagccaacagcaattaaaagtcagttaaaaatttgtaaggatgaagtcaaccggctatcagatcttcaacctcaaattgaacgattaaaaattcaaagcatagccctgaaagagaaaggacaaggacccatgttcctggatgcagactttgtggcctttacaaatcattttaagcaagtcttttctgatgtgcaggccagagagaaagagctacagacaatttttgacactttgccaccaatgcgctatcaggagaccatgagtgccatcaggacatgggtccagcagtcagaaaccaaactctccatacctcaacttagtgtcaccgactatgaaatcatggagcagagactcggggaattgcaggctttacaaagttctctgcaagagcaacaaagtggcctatactatctcagcaccactgtgaaagagatgtcgaagaaagcgccctctgaaattagccggaaatatcaatcagaatttgaagaaattgagggacgctggaagaagctctcctcccagctggttgagcattgtcaaaagctagaggagcaaatgaataaactccgaaaaattcagaatcacatacaaaccctgaagaaatggatggctgaagttgatgtttttctgaaggaggaatggcctgcccttggggattcagaaattctaaaaaagcagctgaaacagtgcagacttttagtcagtgatattcagacaattcagcccagtctaaacagtgtcaatgaaggtgggcagaagataaagaatgaagcagagccagagtttgcttcgagacttgagacagaactcaaagaacttaacactcagtgggatcacatgtgccaacaggtctatgccagaaaggaggccttgaagggaggtttggagaaaactgtaagcctccagaaagatctatcagagatgcacgaatggatgacacaagctgaagaagagtatcttgagagagattttgaatataaaactccagatgaattacagaaagcagttgaagagatgaagagagctaaagaagaggcccaacaaaaagaagcgaaagtgaaactccttactgagtctgtaaatagtgtcatagctcaagctccacctgtagcacaagaggccttaaaaaaggaacttgaaactctaaccaccaactaccagtggctctgcactaggctgaatgggaaatgcaagactttggaagaagtttgggcatgttggcatgagttattgtcatacttggagaaagcaaacaagtggctaaatgaagtagaatttaaacttaaaaccactgaaaacattcctggcggagctgaggaaatctctgaggtgctagattcacttgaaaatttgatgcgacattcagaggataacccaaatcagattcgcatattggcacagaccctaacagatggcggagtcatggatgagctaatcaatgaggaacttgagacatttaattctcgttggagggaactacatgaagaggctgtaaggaggcaaaagttgcttgaacagagcatccagtctgcccaggagactgaaaaatccttacacttaatccaggagtccctcacattcattgacaagcagttggcagcttatattgcagacaaggtggacgcagctcaaatgcctcaggaagcccagaaaatccaatctgatttgacaagtcatgagatcagtttagaagaaatgaagaaacataatcaggggaaggaggctgcccaaagagtcctgtctcagattgatgttgcacagaaaaaattacaagatgtctccatgaagtttcgattattccagaaaccagccaattttgagcagcgtctacaagaaagtaagatgattttagatgaagtgaagatgcacttgcctgcattggaaacaaagagtgtggaacaggaagtagtacagtcacagctaaatcattgtgtgaacttgtataaaagtctgagtgaagtgaagtctgaagtggaaatggtgataaagactggacgtcagattgtacagaaaaagcagacggaaaatcccaaagaacttgatgaaagagtaacagctttgaaattgcattataatgagctgggagcaaaggtaacagaaagaaagcaacagttggagaaatgcttgaaattgtcccgtaagatgcgaaaggaaatgaatgtcttgacagaatggctggcagctacagatatggaattgacaaagagatcagcagttgaaggaatgcctagtaatttggattctgaagttgcctggggaaaggctactcaaaaagagattgagaaacagaaggtgcacctgaagagtatcacagaggtaggagaggccttgaaaacagttttgggcaagaaggagacgttggtggaagataaactcagtcttctgaatagtaactggatagctgtcacctcccgagcagaagagtggttaaatcttttgttggaataccagaaacacatggaaacttttgaccagaatgtggaccacatcacaaagtggatcattcaggctgacacacttttggatgaatcagagaaaaagaaaccccagcaaaaagaagacgtgcttaagcgtttaaaggcagaactgaatgacatacgcccaaaggtggactctacacgtgaccaagcagcaaacttgatggcaaaccgcggtgaccactgcaggaaattagtagagccccaaatctcagagctcaaccatcgatttgcagccatttcacacagaattaagactggaaagaatgaagacaatgagggtactgtaaaagaattgttgcaaagaggagacaacttacaacaaagaatcacagatgagagaaagcgagaggaaataaagataaaacagcagctgttacagacaaaacataatgctctcaaggatttgaggtctcaaagaagaaaaaaggctctagaaatttctcatcagtggtatcagtacaagaggcaggctgatgatctcctgaaatgcttggatgacattgaaaaaaaattagccagcctacctgagcccagagatgaaaggaaaataaaggaaattgatcgggaattgcagaagaagaaagaggagctgaatgcagtgcgtaggcaagctgagggcttgtctgaggatggggccgcaatggcagtggagccaactcagatccagctcagcaagcgctggcgggaaattgagagcaaatttgctcagtttcgaagactcaactttgcacaaattcacactgtccgtgaagaaacgatgatggtgatgactgaagacatgcctttggaaatttcttatgtgccttctacttatttgactgaaatcactcatgtctcacaagccctattagaagtggaacaacttctcaatgctcctgacctctgtgctaaggactttgaagatctctttaagcaagaggagtctctgaagaatataaaagatagtctacaacaaagctcaggtcggattgacattattcatagcaagaagacagcagcattgcaaagtgcaacgcctgtggaaagggtgaagctacaggaagctctctcccagcttgatttccaatgggaaaaagttaacaaaatgtacaaggaccgacaagggcgatttgacagatctgttgagaaatggcggcgttttcattatgatataaagatatttaatcagtggctaacagaagctgaacagtttctcagaaagacacaaattcctgagaattgggaacatgctaaatacaaatggtatcttaaggaactccaggatggcattgggcagcggcaaactgttgtcagaacattgaatgcaactggggaagaaataattcagcaatcctcaaaaacagatgccagtattctacaggaaaaattgggaagcctgaatctgcggtggcaggaggtctgcaaacagctgtcagacagaaaaaagaggctagaagaacaaaagaatatcttgtcagaatttcaaagagatttaaatgaatttgttttatggttggaggaagcagataacattgctagtatcccacttgaacctggaaaagagcagcaactaaaagaaaagcttgagcaagtcaagttactggtggaagagttgcccctgcgccagggaattctcaaacaattaaatgaaactggaggacccgtgcttgtaagtgctcccataagcccagaagagcaagataaacttgaaaataagctcaagcagacaaatctccagtggataaaggtttccagagctttacctgagaaacaaggagaaattgaagctcaaataaaagaccttgggcagcttgaaaaaaagcttgaagaccttgaagagcagttaaatcatctgctgctgtggttatctcctattaggaatcagttggaaatttataaccaaccaaaccaagaaggaccatttgacgttaaggaaactgaaatagcagttcaagctaaacaaccggatgtggaagagattttgtctaaagggcagcatttgtacaaggaaaaaccagccactcagccagtgaagaggaagttagaagatctgagctctgagtggaaggcggtaaaccgtttacttcaagagctgagggcaaagcagcctgacctagctcctggactgaccactattggagcctctcctactcagactgttactctggtgacacaacctgtggttactaaggaaactgccatctccaaactagaaatgccatcttccttgatgttggaggtacctgctctggcagatttcaaccgggcttggacagaacttaccgactggctttctctgcttgatcaagttataaaatcacagagggtgatggtgggtgaccttgaggatatcaacgagatgatcatcaagcagaaggcaacaatgcaggatttggaacagaggcgtccccagttggaagaactcattaccgctgcccaaaatttgaaaaacaagaccagcaatcaagaggctagaacaatcattacggatcgaattgaaagaattcagaatcagtgggatgaagtacaagaacaccttcagaaccggaggcaacagttgaatgaaatgttaaaggattcaacacaatggctggaagctaaggaagaagctgagcaggtcttaggacaggccagagccaagcttgagtcatggaaggagggtccctatacagtagatgcaatccaaaagaaaatcacagaaaccaagcagttggccaaagacctccgccagtggcagacaaatgtagatgtggcaaatgacttggccctgaaacttctccgggattattctgcagatgataccagaaaagtccacatgataacagagaatatcaatgcctcttggagaagcattcataaaagggtgagtgagcgagaggctgctttggaagaaactcatagattactgcaacagttccccctggacctggaaaagtttcttgcctggcttacagaagctgaaacaactgccaatgtcctacaggatgctacccgtaaggaaaggctcctagaagactccaagggagtaaaagagctgatgaaacaatggcaagacctccaaggtgaaattgaagctcacacagatgtttatcacaacctggatgaaaacagccaaaaaatcctgagatccctggaaggttccgatgatgcagtcctgttacaaagacgtttggataacatgaacttcaagtggagtgaacttcggaaaaagtctctcaacattaggtcccatttggaagccagttctgaccagtggaagcgtctgcacctttctctgcaggaacttctggtgtggctacagctgaaagatgatgaattaagccggcaggcacctattggaggcgactttccagcagttcagaagcagaacgatgtacatagggccttcaagagggaattgaaaactaaagaacctgtaatcatgagtactcttgagactgtacgaatatttctgacagagcagcctttggaaggactagagaaactctaccaggagcccagagagctgcctcctgaggagagagcccagaatgtcactcggcttctacgaaagcaggctgaggaggtcaatactgagtgggaaaaattgaacctgcactccgctgactggcagagaaaaatagatgagacccttgaaagactccgggaacttcaagaggccacggatgagctggacctcaagctgcgccaagctgaggtgatcaagggatcctggcagcccgtgggcgatctcctcattgactctctccaagatcacctcgagaaagtcaaggcacttcgaggagaaattgcgcctctgaaagagaacgtgagccacgtcaatgaccttgctcgccagcttaccactttgggcattcagctctcaccgtataacctcagcactctggaagacctgaacaccagatggaagcttctgcaggtggccgtcgaggaccgagtcaggcagctgcatgaagcccacagggactttggtccagcatctcagcactttctttccacgtctgtccagggtccctgggagagagccatctcgccaaacaaagtgccctactatatcaaccacgagactcaaacaacttgctgggaccatcccaaaatgacagagctctaccagtctttagctgacctgaataatgtcagattctcagcttataggactgccatgaaactccgaagactgcagaaggccctttgcttggatctcttgagcctgtcagctgcatgtgatgccttggaccagcacaacctcaagcaaaatgaccagcccatggatatcctgcagattattaattgtttgaccactatttatgaccgcctggagcaagagcacaacaatttggtcaacgtccctctctgcgtggatatgtgtctgaactggctgctgaatgtttatgatacgggacgaacagggaggatccgtgtcctgtcttttaaaactggcatcatttccctgtgtaaagcacatttggaagacaagtacagataccttttcaagcaagtggcaagttcaacaggattttgtgaccagcgcaggctgggcctccttctgcatgattctatccaaattccaagacagttgggtgaagttgcatcctttgggggcagtaacattgagccaagtgtccggagctgcttccaatttgctaataataagccagagatcgaagcggccctcttcctagactggatgagactggaaccccagtccatggtgtggctgcccgtcctgcacagagtggctgctgcagaaactgccaagcatcaggccaaatgtaacatctgcaaagagtgtccaatcattggattcaggtacaggagtctaaagcactttaattatgacatctgccaaagctgctttttttctggtcgagttgcaaaaggccataaaatgcactatcccatggtggaatattgcactccgactacatcaggagaagatgttcgagactttgccaaggtactaaaaaacaaatttcgaaccaaaaggtattttgcgaagcatccccgaatgggctacctgccagtgcagactgtcttagagggggacaacatggaaactcccgttactctgatcaacttctggccagtagattctgcgcctgcctcgtcccctcagctttcacacgatgatactcattcacgcattgaacattatgctagcaggctagcagaaatggaaaacagcaatggatcttatctaaatgatagcatctctcctaatgagagcatagatgatgaacatttgttaatccagcattactgccaaagtttgaaccaggactcccccctgagccagcctcgtagtcctgcccagatcttgatttccttagagagtgaggaaagaggggagctagagagaatcctagcagatcttgaggaagaaaacaggaatctgcaagcagaatatgaccgtctaaagcagcagcacgaacataaaggcctgtccccactgccgtcccctcctgaaatgatgcccacctctccccagagtccccgggatgctgagctcattgctgaggccaagctactgcgtcaacacaaaggccgcctggaagccaggatgcaaatcctggaagaccacaataaacagctggagtcacagttacacaggctaaggcagctgctggagcaaccccaggcagaggccaaagtgaatggcacaacggtgtcctctccttctacctctctacagaggtccgacagcagtcagcctatgctgctccgagtggttggcagtcaaacttcggactccatgggtgaggaagatcttctcagtcctccccaggacacaagcacagggttagaggaggtgatggagcaactcaacaactccttccctagttcaagaggacacaatgtaggaagtcttttccacatggcagatgatttgggcagagcgatggagtccttagtatcagtcatgacagatgaagaaggagcagaataaatgttttacaactcctgattcccgcatggtttttataatattcatacaacaaagaggattagacagtaagagtttacaagaaataaatctatatttttgtgaagggtagtggtattatactgtagatttcagtagtttctaagtctgttattgttttgttaacaatggcaggttttacacgtctatgcaattgtacaaaaaagttataagaaaactacatgtaaaatcttgatagctaaataacttgccatttctttatatggaacgcattttgggttgtttaaaaatttataacagttataaagaaagattgtaaactaaagtgtgctttataaaaaaaagttgtttataaaaacccctaaaaacaaaacaaacacacacacacacacatacacacacacacacaaaactttgaggcagcgcattgttttgcatccttttggcgtgatatccatatgaaattcatggctttttctttttttgcatattaaagataagacttcctctaccaccacaccaaatgactactacacactgctcatttgagaactgtcagctgagtggggcaggcttgagttttcatttcatatatctatatgtctataagtatataaatactatagttatatagataaagagatacgaatttctatagactgactttttccattttttaaatgttcatgtcacatcctaatagaaagaaattacttctagtcagtcatccaggcttacctgcttggtctagaatggatttttcccggagccggaagccaggaggaaactacaccacactaaaacattgtctacagctccagatgtttctcattttaaacaactttccactgacaacgaaagtaaagtaaagtattggatttttttaaagggaacatgtgaatgaatacacaggacttattatatcagagtgagtaatcggttggttggttgattgattgattgattgatacattcagcttcctgctgctagcaatgccacgatttagatttaatgatgcttcagtggaaatcaatcagaaggtattctgaccttgtgaacatcagaaggtattttttaactcccaagcagtagcaggacgatgatagggctggagggctatggattcccagcccatccctgtgaaggagtaggccactctttaagtgaaggattggatgattgttcataatacataaagttctctgtaattacaactaaattattatgccctcttctcacagtcaaaaggaactgggtggtttggtttttgttgcttttttagatttattgtcccatgtgggatgagtttttaaatgccacaagacataatttaaaataaataaactttgggaaaaggtgtaaaacagtagccccatcacatttgtgatactgacaggtatcaacccagaagcccatgaactgtgtttccatcctttgcatttctctgcgagtagttccacacaggtttgtaagtaagtaagaaagaaggcaaattgattcaaatgttacaaaaaaacccttcttggtggattagacaggttaaatatataaacaaacaaacaaaaattgctcaaaaaagaggagaaaagctcaagaggaaaagctaaggactggtaggaaaaagctttactctttcatgccattttatttctttttgatttttaaatcattcattcaatagataccaccgtgtgacctataattttgcaaatctgttacctctgacatcaagtgtaattagcttttggagagtgggctgacatcaagtgtaattagcttttggagagtgggttttgtccattattaataattaattaattaacatcaaacacggcttctcatgctatttctacctcactttggttttggggtgttcctgataattgtgcacacctgagttcacagcttcaccacttgtccattgcgttattttctttttcctttataattctttctttttccttcataattttcaaaagaaaacccaaagctctaaggtaacaaattaccaaattacatgaagatttggtttttgtcttgcatttttttcctttatgtgacgctggaccttttctttacccaaggatttttaaaactcagatttaaaacaaggggttactttacatcctactaagaagtttaagtaagtaagtttcattctaaaatcagaggtaaatagagtgcataaataattttgttttaatctttttgtttttcttttagacacattagctctggagtgagtctgtcataatatttgaacaaaaattgagagctttattgctgcattttaagcataattaatttggacattatttcgtgttgtgttctttataaccaccaagtattaaactgtaaatcataatgtaactgaagcataaacatcacatggcatgttttgtcattgttttcaggtactgagttcttacttgagtatcataatatattgtgttttaacaccaacactgtaacatttacgaattatttttttaaacttcagttttactgcattttcacaacatatcagacttcaccaaatatatgccttactattgtattatagtactgctttactgtgtatctcaataaagcacgcagttatgttacaaaaaagta

SEQ ID NO: 41 - protein, 3662 aa, Homo sapiens
MLWWEEVEDCYEREDVQKKTFTKWVNAQFSKFGKQHIENLFSDLQDGRRLLDLLEGLTGQKLPKEKGSTRVHALNNVNKALRVLQNNNVDLVNIGSTDIVDGNHKLTLGLIWNIILHWQVKNVMKNIMAGLQQTNSEKILLSWVRQSTRNYPQVNVINFTTSWSDGLALNALIHSHRPDLFDWNSVVCQQSATQRLEHAFNIARYQLGIEKLLDPEDVDTTYPDKKSILMYITSLFQVLPQQVSIEAIQEVEMLPRPPKVTKEEHFQLHHQMHYSQQITVSLAQGYERTSSPKPRFKSYAYTQAAYVTTSDPTRSPFPSQHLEAPEDKSFGSSLMESEVNLDRYQTALEEVLSWLLSAEDTLQAQGEISNDVEVVKDQFHTHEGYMMDLTAHQGRVGNILQLGSKLIGTGKLSEDEETEVQEQMNLLNSRWECLRVASMEKQSNLHRVLMDLQNQKLKELNDWLTKTEERTRKMEEEPLGPDLEDLKRQVQQHKVLQEDLEQEQVRVNSLTHMVVVVDESSGDHATAALEEQLKVLGDRWANICRWTEDRWVLLQDILLKWQRLTEEQCLFSAWLSEKEDAVNKIHTTGFKDQNEMLSSLQKLAVLKADLEKKKQSMGKLYSLKQDLLSTLKNKSVTQKTEAWLDNFARCWDNLVQKLEKSTAQISQAVTTTQPSLTQTTVMETVTTVTTREQILVKHAQEELPPPPPQKKRQITVDSEIRKRLDVDITELHSWITRSEAVLQSPEFAIFRKEGNFSDLKEKVNAIEREKAEKFRKLQDASRSAQALVEQMVNEGVNADSIKQASEQLNSRWIEFCQLLSERLNWLEYQNNIIAFYNQLQQLEQMTTTAENWLKIQPTTPSEPTAIKSQLKICKDEVNRLSDLQPQIERLKIQSIALKEKGQGPMFLDADFVAFTNHFKQVFSDVQAREKELQTIFDTLPPMRYQETMSAIRTWVQQSETKLSIPQLSVTDYEIMEQRLGELQALQSSLQEQQSGLYYLSTTVKEMSKKAPSEISRKYQSEFEEIEGRWKKLSSQLVEHCQKLEEQMNKLRKIQNHIQTLKKWMAEVDVFLKEEWPALGDSEILKKQLKQCRLLVSDIQTIQPSLNSVNEGGQKIKNEAEPEFASRLETELKELNTQWDHMCQQVYARKEALKGGLEKTVSLQKDLSEMHEWMTQAEEEYLERDFEYKTPDELQKAVEEMKRAKEEAQQKEAKVKLLTESVNSVIAQAPPVAQEALKKELETLTTNYQWLCTRLNGKCKTLEEVWACWHELLSYLEKANKWLNEVEFKLKTTENIPGGAEEISEVLDSLENLMRHSEDNPNQIRILAQTLTDGGVMDELINEELETFNSRWRELHEEAVRRQKLLEQSIQSAQETEKSLHLIQESLTFIDKQLAAYIADKVDAAQMPQEAQKIQSDLTSHEISLEEMKKHNQGKEAAQRVLSQIDVAQKKLQDVSMKFRLFQKPANFEQRLQESKMILDEVKMHLPALETKSVEQEVVQSQLNHCVNLYKSLSEVKSEVEMVIKTGRQIVQKKQTENPKELDERVTALKLHYNELGAKVTERKQQLEKCLKLSRKMRKEMNVLTEWLAATDMELTKRSAVEGMPSNLDSEVAWGKATQKEIEKQKVHLKSITEVGEALKTVLGKKETLVEDKLSLLNSNWIAVTSRAEEWLNLLLEYQKHMETFDQNVDHITKWIIQADTLLDESEKKKPQQKEDVLKRLKAELNDIRPKVDSTRDQAANLMANRGDHCRKLVEPQISELNHRFAAISHRIKTGKNEDNEGTVKELLQRGDNLQQRITDERKREEIKIKQQLLQTKHNALKDLRSQRRKKALEISHQWYQYKRQADDLLKCLDDIEKKLASLPEPRDERKIKEIDRELQKKKEELNAVRRQAEGLSEDGAAMAVEPTQIQLSKRWREIESKFAQFRRLNFAQIHTVREETMMVMTEDMPLEISYVPSTYLTEITHVSQALLEVEQLLNAPDLCAKDFEDLFKQEESLKNIKDSLQQSSGRIDIIHSKKTAALQSATPVERVKLQEALSQLDFQWEKVNKMYKDRQGRFDRSVEKWRRFHYDIKIFNQWLTEAEQFLRKTQIPENWEHAKYKWYLKELQDGIGQRQTVVRTLNATGEEIIQQSSKTDASILQEKLGSLNLRWQEVCKQLSDRKKRLEEQKNILSEFQRDLNEFVLWLEEADNIASIPLEPGKEQQLKEKLEQVKLLVEELPLRQGILKQLNETGGPVLVSAPISPEEQDKLENKLKQTNLQWIKVSRALPEKQGEIEAQIKDLGQLEKKLEDLEEQLNHLLLWLSPIRNQLEIYNQPNQEGPFDVKETEIAVQAKQPDVEEILSKGQHLYKEKPATQPVKRKLEDLSSEWKAVNRLLQELRAKQPDLAPGLTTIGASPTQTVTLVTQPVVTKETAISKLEMPSSLMLEVPALADFNRAWTELTDWLSLLDQVIKSQRVMVGDLEDINEMIIKQKATMQDLEQRRPQLEELITAAQNLKNKTSNQEARTIITDRIERIQNQWDEVQEHLQNRRQQLNEMLKDSTQWLEAKEEAEQVLGQARAKLESWKEGPYTVDAIQKKITETKQLAKDLRQWQTNVDVANDLALKLLRDYSADDTRKVHMITENINASWRSIHKRVSEREAALEETHRLLQQFPLDLEKFLAWLTEAETTANVLQDATRKERLLEDSKGVKELMKQWQDLQGEIEAHTDVYHNLDENSQKILRSLEGSDDAVLLQRRLDNMNFKWSELRKKSLNIRSHLEASSDQWKRLHLSLQELLVWLQLKDDELSRQAPIGGDFPAVQKQNDVHRAFKRELKTKEPVIMSTLETVRIFLTEQPLEGLEKLYQEPRELPPEERAQNVTRLLRKQAEEVNTEWEKLNLHSADWQRKIDETLERLRELQEATDELDLKLRQAEVIKGSWQPVGDLLIDSLQDHLEKVKALRGEIAPLKENVSHVNDLARQLTTLGIQLSPYNLSTLEDLNTRWKLLQVAVEDRVRQLHEAHRDFGPASQHFLSTSVQGPWERAISPNKVPYYINHETQTTCWDHPKMTELYQSLADLNNVRFSAYRTAMKLRRLQKALCLDLLSLSAACDALDQHNLKQNDQPMDILQIINCLTTIYDRLEQEHNNLVNVPLCVDMCLNWLLNVYDTGRTGRIRVLSFKTGIISLCKAHLEDKYRYLFKQVASSTGFCDQRRLGLLLHDSIQIPRQLGEVASFGGSNIEPSVRSCFQFANNKPEIEAALFLDWMRLEPQSMVWLPVLHRVAAAETAKHQAKCNICKECPIIGFRYRSLKHFNYDICQSCFFSGRVAKGHKMHYPMVEYCTPTTSGEDVRDFAKVLKNKFRTKRYFAKHPRMGYLPVQTVLEGDNMETPVTLINFWPVDSAPASSPQLSHDDTHSRIEHYASRLAEMENSNGSYLNDSISPNESIDDEHLLIQHYCQSLNQDSPLSQPRSPAQILISLESEERGELERILADLEEENRNLQAEYDRLKQQHEHKGLSPLPSPPEMMPTSPQSPRDAELIAEAKLLRQHKGRLEARMQILEDHNKQLESQLHRLRQLLEQPQAEAKVNGTTVSSPSTSLQRSDSSQPMLLRVVGSQTSDSMGEEDLLSPPQDTSTGLEEVMEQLNNSFPSSRGHNVGSLFHMADDLGRAMESLVSVMTDEEGAE

SEQ ID NO: 42 - DNA, 13785 bp, Homo sapiens
actttccccctacaggactcagatctgggaggcaattaccttcggagaaaaacgaataggaaaaactgaagtgttactttttttaaagctgctgaagtttgttggtttctcattgtttttaagcctactggagcaataaagtttgaagaacttttaccaggttttttttatcgctgccttgatatacacttttcaaaatgctttggtgggaagaagtagaggactgttatgaaagagaagatgttcaaaagaaaacattcacaaaatgggtaaatgcacaattttctaagtttgggaagcagcatattgagaacctcttcagtgacctacaggatgggaggcgcctcctagacctcctcgaaggcctgacagggcaaaaactgccaaaagaaaaaggatccacaagagttcatgccctgaacaatgtcaacaaggcactgcgggttttgcagaacaataatgttgatttagtgaatattggaagtactgacatcgtagatggaaatcataaactgactcttggtttgatttggaatataatcctccactggcaggtcaaaaatgtaatgaaaaatatcatggctggattgcaacaaaccaacagtgaaaagattctcctgagctgggtccgacaatcaactcgtaattatccacaggttaatgtaatcaacttcaccaccagctggtctgatggcctggctttgaatgctctcatccatagtcataggccagacctatttgactggaatagtgtggtttgccagcagtcagccacacaacgactggaacatgcattcaacatcgccagatatcaattaggcatagagaaactactcgatcctgaagatgttgataccacctatccagataagaagtccatcttaatgtacatcacatcactcttccaagttttgcctcaacaagtgagcattgaagccatccaggaagtggaaatgttgccaaggccacctaaagtgactaaagaagaacattttcagttacatcatcaaatgcactattctcaacagatcacggtcagtctagcacagggatatgagagaacttcttcccctaagcctcgattcaagagctatgcctacacacaggctgcttatgtcaccacctctgaccctacacggagcccatttccttcacagcatttggaagctcctgaagacaagtcatttggcagttcattgatggagagtgaagtaaacctggaccgttatcaaacagctttagaagaagtattatcgtggcttctttctgctgaggacacattgcaagcacaaggagagatttctaatgatgtggaagtggtgaaagaccagtttcatactcatgaggggtacatgatggatttgacagcccatcagggccgggttggtaatattctacaattgggaagtaagctgattggaacaggaaaattatcagaagatgaagaaactgaagtacaagagcagatgaatctcctaaattcaagatgggaatgcctcagggtagctagcatggaaaaacaaagcaatttacatagagttttaatggatctccagaatcagaaactgaaagagttgaatgactggctaacaaaaacagaagaaagaacaaggaaaatggaggaagagcctcttggacctgatcttgaagacctaaaacgccaagtacaacaacataaggtgcttcaagaagatctagaacaagaacaagtcagggtcaattctctcactcacatggtggtggtagttgatgaatctagtggagatcacgcaactgctgctttggaagaacaacttaaggtattgggagatcgatgggcaaacatctgtagatggacagaagaccgctgggttcttttacaagacatccttctcaaatggcaacgtcttactgaagaacagtgcctttttagtgcatggctttcagaaaaagaagatgcagtgaacaagattcacacaactggctttaaagatcaaaatgaaatgttatcaagtcttcaaaaactggccgttttaaaagcggatctagaaaagaaaaagcaatccatgggcaaactgtattcactcaaacaagatcttctttcaacactgaagaataagtcagtgacccagaagacggaagcatggctggataactttgcccggtgttgggataatttagtccaaaaacttgaaaagagtacagcacagatttcacaggctgtcaccaccactcagccatcactaacacagacaactgtaatggaaacagtaactacggtgaccacaagggaacagatcctggtaaagcatgctcaagaggaacttccaccaccacctccccaaaagaagaggcagattactgtggattctgaaattaggaaaaggttggatgttgatataactgaacttcacagctggattactcgctcagaagctgtgttgcagagtcctgaatttgcaatctttcggaaggaaggcaacttctcagacttaaaagaaaaagtcaatgccatagagcgagaaaaagctgagaagttcagaaaactgcaagatgccagcagatcagctcaggccctggtggaacagatggtgaatgagggtgttaatgcagatagcatcaaacaagcctcagaacaactgaacagccggtggatcgaattctgccagttgctaagtgagagacttaactggctggagtatcagaacaacatcatcgctttctataatcagctacaacaattggagcagatgacaactactgctgaaaactggttgaaaatccaacccaccaccccatcagagccaacagcaattaaaagtcagttaaaaatttgtaaggatgaagtcaaccggctatcagatcttcaacctcaaattgaacgattaaaaattcaaagcatagccctgaaagagaaaggacaaggacccatgttcctggatgcagactttgtggcctttacaaatcattttaagcaagtcttttctgatgtgcaggccagagagaaagagctacagacaatttttgacactttgccaccaatgcgctatcaggagaccatgagtgccatcaggacatgggtccagcagtcagaaaccaaactctccatacctcaacttagtgtcaccgactatgaaatcatggagcagagactcggggaattgcaggctttacaaagttctctgcaagagcaacaaagtggcctatactatctcagcaccactgtgaaagagatgtcgaagaaagcgccctctgaaattagccggaaatatcaatcagaatttgaagaaattgagggacgctggaagaagctctcctcccagctggttgagcattgtcaaaagctagaggagcaaatgaataaactccgaaaaattcagaatcacatacaaaccctgaagaaatggatggctgaagttgatgtttttctgaaggaggaatggcctgcccttggggattcagaaattctaaaaaagcagctgaaacagtgcagacttttagtcagtgatattcagacaattcagcccagtctaaacagtgtcaatgaaggtgggcagaagataaagaatgaagcagagccagagtttgcttcgagacttgagacagaactcaaagaacttaacactcagtgggatcacatgtgccaacaggtctatgccagaaaggaggccttgaagggaggtttggagaaaactgtaagcctccagaaagatctatcagagatgcacgaatggatgacacaagctgaagaagagtatcttgagagagattttgaatataaaactccagatgaattacagaaagcagttgaagagatgaagagagctaaagaagaggcccaacaaaaagaagcgaaagtgaaactccttactgagtctgtaaatagtgtcatagctcaagctccacctgtagcacaagaggccttaaaaaaggaacttgaaactctaaccaccaactaccagtggctctgcactaggctgaatgggaaatgcaagactttggaagaagtttgggcatgttggcatgagttattgtcatacttggagaaagcaaacaagtggctaaatgaagtagaatttaaacttaaaaccactgaaaacattcctggcggagctgaggaaatctctgaggtgctagattcacttgaaaatttgatgcgacattcagaggataacccaaatcagattcgcatattggcacagaccctaacagatggcggagtcatggatgagctaatcaatgaggaacttgagacatttaattctcgttggagggaactacatgaagaggctgtaaggaggcaaaagttgcttgaacagagcatccagtctgcccaggagactgaaaaatccttacacttaatccaggagtccctcacattcattgacaagcagttggcagcttatattgcagacaaggtggacgcagctcaaatgcctcaggaagcccagaaaatccaatctgatttgacaagtcatgagatcagtttagaagaaatgaagaaacataatcaggggaaggaggctgcccaaagagtcctgtctcagattgatgttgcacagaaaaaattacaagatgtctccatgaagtttcgattattccagaaaccagccaattttgagcagcgtctacaagaaagtaagatgattttagatgaagtgaagatgcacttgcctgcattggaaacaaagagtgtggaacaggaagtagtacagtcacagctaaatcattgtgtgaacttgtataaaagtctgagtgaagtgaagtctgaagtggaaatggtgataaagactggacgtcagattgtacagaaaaagcagacggaaaatcccaaagaacttgatgaaagagtaacagctttgaaattgcattataatgagctgggagcaaaggtaacagaaagaaagcaacagttggagaaatgcttgaaattgtcccgtaagatgcgaaaggaaatgaatgtcttgacagaatggctggcagctacagatatggaattgacaaagagatcagcagttgaaggaatgcctagtaatttggattctgaagttgcctggggaaaggctactcaaaaagagattgagaaacagaaggtgcacctgaagagtatcacagaggtaggagaggccttgaaaacagttttgggcaagaaggagacgttggtggaagataaactcagtcttctgaatagtaactggatagctgtcacctcccgagcagaagagtggttaaatcttttgttggaataccagaaacacatggaaacttttgaccagaatgtggaccacatcacaaagtggatcattcaggctgacacacttttggatgaatcagagaaaaagaaaccccagcaaaaagaagacgtgcttaagcgtttaaaggcagaactgaatgacatacgcccaaaggtggactctacacgtgaccaagcagcaaacttgatggcaaaccgcggtgaccactgcaggaaattagtagagccccaaatctcagagctcaaccatcgatttgcagccatttcacacagaattaagactggaaaggcctccattcctttgaaggaattggagcagtttaactcagatatacaaaaattgcttgaaccactggaggctgaaattcagcagggggtgaatctgaaagaggaagacttcaataaagatatggatttgaggtctcaaagaagaaaaaaggctctagaaatttctcatcagtggtatcagtacaagaggcaggctgatgatctcctgaaatgcttggatgacattgaaaaaaaattagccagcctacctgagcccagagatgaaaggaaaataaaggaaattgatcgggaattgcagaagaagaaagaggagctgaatgcagtgcgtaggcaagctgagggcttgtctgaggatggggccgcaatggcagtggagccaactcagatccagctcagcaagcgctggcgggaaattgagagcaaatttgctcagtttcgaagactcaactttgcacaaattcacactgtccgtgaagaaacgatgatggtgatgactgaagacatgcctttggaaatttcttatgtgccttctacttatttgactgaaatcactcatgtctcacaagccctattagaagtggaacaacttctcaatgctcctgacctctgtgctaaggactttgaagatctctttaagcaagaggagtctctgaagaatataaaagatagtctacaacaaagctcaggtcggattgacattattcatagcaagaagacagcagcattgcaaagtgcaacgcctgtggaaagggtgaagctacaggaagctctctcccagcttgatttccaatgggaaaaagttaacaaaatgtacaaggaccgacaagggcgatttgacagatctgttgagaaatggcggcgttttcattatgatataaagatatttaatcagtggctaacagaagctgaacagtttctcagaaagacacaaattcctgagaattgggaacatgctaaatacaaatggtatcttaaggaactccaggatggcattgggcagcggcaaactgttgtcagaacattgaatgcaactggggaagaaataattcagcaatcctcaaaaacagatgccagtattctacaggaaaaattgggaagcctgaatctgcggtggcaggaggtctgcaaacagctgtcagacagaaaaaagaggctagaagaacaaaagaatatcttgtcagaatttcaaagagatttaaatgaatttgttttatggttggaggaagcagataacattgctagtatcccacttgaacctggaaaagagcagcaactaaaagaaaagcttgagcaagtcaagttactggtggaagagttgcccctgcgccagggaattctcaaacaattaaatgaaactggaggacccgtgcttgtaagtgctcccataagcccagaagagcaagataaacttgaaaataagctcaagcagacaaatctccagtggataaaggtttccagagctttacctgagaaacaaggagaaattgaagctcaaataaaagaccttgggcagcttgaaaaaaagcttgaagaccttgaagagcagttaaatcatctgctgctgtggttatctcctattaggaatcagttggaaatttataaccaaccaaaccaagaaggaccatttgacgttaaggaaactgaaatagcagttcaagctaaacaaccggatgtggaagagattttgtctaaagggcagcatttgtacaaggaaaaaccagccactcagccagtgaagaggaagttagaagatctgagctctgagtggaaggcggtaaaccgtttacttcaagagctgagggcaaagcagcctgacctagctcctggactgaccactattggagcctctcctactcagactgttactctggtgacacaacctgtggttactaaggaaactgccatctccaaactagaaatgccatcttccttgatgttggaggtacctgctctggcagatttcaaccgggcttggacagaacttaccgactggctttctctgcttgatcaagttataaaatcacagagggtgatggtgggtgaccttgaggatatcaacgagatgatcatcaagcagaaggcaacaatgcaggatttggaacagaggcgtccccagttggaagaactcattaccgctgcccaaaatttgaaaaacaagaccagcaatcaagaggctagaacaatcattacggatcgaattgaaagaattcagaatcagtgggatgaagtacaagaacaccttcagaaccggaggcaacagttgaatgaaatgttaaaggattcaacacaatggctggaagctaaggaagaagctgagcaggtcttaggacaggccagagccaagcttgagtcatggaaggagggtccctatacagtagatgcaatccaaaagaaaatcacagaaaccaagcagttggccaaagacctccgccagtggcagacaaatgtagatgtggcaaatgacttggccctgaaacttctccgggattattctgcagatgataccagaaaagtccacatgataacagagaatatcaatgcctcttggagaagcattcataaaagggtgagtgagcgagaggctgctttggaagaaactcatagattactgcaacagttccccctggacctggaaaagtttcttgcctggcttacagaagctgaaacaactgccaatgtcctacaggatgctacccgtaaggaaaggctcctagaagactccaagggagtaaaagagctgatgaaacaatggcaagacctccaaggtgaaattgaagctcacacagatgtttatcacaacctggatgaaaacagccaaaaaatcctgagatccctggaaggttccgatgatgcagtcctgttacaaagacgtttggataacatgaacttcaagtggagtgaacttcggaaaaagtctctcaacattaggtcccatttggaagccagttctgaccagtggaagcgtctgcacctttctctgcaggaacttctggtgtggctacagctgaaagatgatgaattaagccggcaggcacctattggaggcgactttccagcagttcagaagcagaacgatgtacatagggccttcaagagggaattgaaaactaaagaacctgtaatcatgagtactcttgagactgtacgaatatttctgacagagcagcctttggaaggactagagaaactctaccaggagcccagagagctgcctcctgaggagagagcccagaatgtcactcggcttctacgaaagcaggctgaggaggtcaatactgagtgggaaaaattgaacctgcactccgctgactggcagagaaaaatagatgagacccttgaaagactccgggaacttcaagaggccacggatgagctggacctcaagctgcgccaagctgaggtgatcaagggatcctggcagcccgtgggcgatctcctcattgactctctccaagatcacctcgagaaagtcaaggcacttcgaggagaaattgcgcctctgaaagagaacgtgagccacgtcaatgaccttgctcgccagcttaccactttgggcattcagctctcaccgtataacctcagcactctggaagacctgaacaccagatggaagcttctgcaggtggccgtcgaggaccgagtcaggcagctgcatgaagcccacagggactttggtccagcatctcagcactttctttccacgtctgtccagggtccctgggagagagccatctcgccaaacaaagtgccctactatatcaaccacgagactcaaacaacttgctgggaccatcccaaaatgacagagctctaccagtctttagctgacctgaataatgtcagattctcagcttataggactgccatgaaactccgaagactgcagaaggccctttgcttggatctcttgagcctgtcagctgcatgtgatgccttggaccagcacaacctcaagcaaaatgaccagcccatggatatcctgcagattattaattgtttgaccactatttatgaccgcctggagcaagagcacaacaatttggtcaacgtccctctctgcgtggatatgtgtctgaactggctgctgaatgtttatgatacgggacgaacagggaggatccgtgtcctgtcttttaaaactggcatcatttccctgtgtaaagcacatttggaagacaagtacagataccttttcaagcaagtggcaagttcaacaggattttgtgaccagcgcaggctgggcctccttctgcatgattctatccaaattccaagacagttgggtgaagttgcatcctttgggggcagtaacattgagccaagtgtccggagctgcttccaatttgctaataataagccagagatcgaagcggccctcttcctagactggatgagactggaaccccagtccatggtgtggctgcccgtcctgcacagagtggctgctgcagaaactgccaagcatcaggccaaatgtaacatctgcaaagagtgtccaatcattggattcaggtacaggagtctaaagcactttaattatgacatctgccaaagctgctttttttctggtcgagttgcaaaaggccataaaatgcactatcccatggtggaatattgcactccgactacatcaggagaagatgttcgagactttgccaaggtactaaaaaacaaatttcgaaccaaaaggtattttgcgaagcatccccgaatgggctacctgccagtgcagactgtcttagagggggacaacatggaaactcccgttactctgatcaacttctggccagtagattctgcgcctgcctcgtcccctcagctttcacacgatgatactcattcacgcattgaacattatgctagcaggctagcagaaatggaaaacagcaatggatcttatctaaatgatagcatctctcctaatgagagcatagatgatgaacatttgttaatccagcattactgccaaagtttgaaccaggactcccccctgagccagcctcgtagtcctgcccagatcttgatttccttagagagtgaggaaagaggggagctagagagaatcctagcagatcttgaggaagaaaacaggaatctgcaagcagaatatgaccgtctaaagcagcagcacgaacataaaggcctgtccccactgccgtcccctcctgaaatgatgcccacctctccccagagtccccgggatgctgagctcattgctgaggccaagctactgcgtcaacacaaaggccgcctggaagccaggatgcaaatcctggaagaccacaataaacagctggagtcacagttacacaggctaaggcagctgctggagcaaccccaggcagaggccaaagtgaatggcacaacggtgtcctctccttctacctctctacagaggtccgacagcagtcagcctatgctgctccgagtggttggcagtcaaacttcggactccatgggtgaggaagatcttctcagtcctccccaggacacaagcacagggttagaggaggtgatggagcaactcaacaactccttccctagttcaagaggacacaatgtaggaagtcttttccacatggcagatgatttgggcagagcgatggagtccttagtatcagtcatgacagatgaagaaggagcagaataaatgttttacaactcctgattcccgcatggtttttataatattcatacaacaaagaggattagacagtaagagtttacaagaaataaatctatatttttgtgaagggtagtggtattatactgtagatttcagtagtttctaagtctgttattgttttgttaacaatggcaggttttacacgtctatgcaattgtacaaaaaagttataagaaaactacatgtaaaatcttgatagctaaataacttgccatttctttatatggaacgcattttgggttgtttaaaaatttataacagttataaagaaagattgtaaactaaagtgtgctttataaaaaaaagttgtttataaaaacccctaaaaacaaaacaaacacacacacacacacatacacacacacacacaaaactttgaggcagcgcattgttttgcatccttttggcgtgatatccatatgaaattcatggctttttctttttttgcatattaaagataagacttcctctaccaccacaccaaatgactactacacactgctcatttgagaactgtcagctgagtggggcaggcttgagttttcatttcatatatctatatgtctataagtatataaatactatagttatatagataaagagatacgaatttctatagactgactttttccattttttaaatgttcatgtcacatcctaatagaaagaaattacttctagtcagtcatccaggcttacctgcttggtctagaatggatttttcccggagccggaagccaggaggaaactacaccacactaaaacattgtctacagctccagatgtttctcattttaaacaactttccactgacaacgaaagtaaagtaaagtattggatttttttaaagggaacatgtgaatgaatacacaggacttattatatcagagtgagtaatcggttggttggttgattgattgattgattgatacattcagcttcctgctgctagcaatgccacgatttagatttaatgatgcttcagtggaaatcaatcagaaggtattctgaccttgtgaacatcagaaggtattttttaactcccaagcagtagcaggacgatgatagggctggagggctatggattcccagcccatccctgtgaaggagtaggccactctttaagtgaaggattggatgattgttcataatacataaagttctctgtaattacaactaaattattatgccctcttctcacagtcaaaaggaactgggtggtttggtttttgttgcttttttagatttattgtcccatgtgggatgagtttttaaatgccacaagacataatttaaaataaataaactttgggaaaaggtgtaaaacagtagccccatcacatttgtgatactgacaggtatcaacccagaagcccatgaactgtgtttccatcctttgcatttctctgcgagtagttccacacaggtttgtaagtaagtaagaaagaaggcaaattgattcaaatgttacaaaaaaacccttcttggtggattagacaggttaaatatataaacaaacaaacaaaaattgctcaaaaaagaggagaaaagctcaagaggaaaagctaaggactggtaggaaaaagctttactctttcatgccattttatttctttttgatttttaaatcattcattcaatagataccaccgtgtgacctataattttgcaaatctgttacctctgacatcaagtgtaattagcttttggagagtgggctgacatcaagtgtaattagcttttggagagtgggttttgtccattattaataattaattaattaacatcaaacacggcttctcatgctatttctacctcactttggttttggggtgttcctgataattgtgcacacctgagttcacagcttcaccacttgtccattgcgttattttctttttcctttataattctttctttttccttcataattttcaaaagaaaacccaaagctctaaggtaacaaattaccaaattacatgaagatttggtttttgtcttgcatttttttcctttatgtgacgctggaccttttctttacccaaggatttttaaaactcagatttaaaacaaggggttactttacatcctactaagaagtttaagtaagtaagtttcattctaaaatcagaggtaaatagagtgcataaataattttgttttaatctttttgtttttcttttagacacattagctctggagtgagtctgtcataatatttgaacaaaaattgagagctttattgctgcattttaagcataattaatttggacattatttcgtgttgtgttctttataaccaccaagtattaaactgtaaatcataatgtaactgaagcataaacatcacatggcatgttttgtcattgttttcaggtactgagttcttacttgagtatcataatatattgtgttttaacaccaacactgtaacatttacgaattatttttttaaacttcagttttactgcattttcacaacatatcagacttcaccaaatatatgccttactattgtattatagtactgctttactgtgtatctcaataaagcacgcagttatgttacaaaaaagta

SEQ ID NO: 43 - protein, 3657 aa, Homo sapiens
MLWWEEVEDCYEREDVQKKTFTKWVNAQFSKFGKQHIENLFSDLQDGRRLLDLLEGLTGQKLPKEKGSTRVHALNNVNKALRVLQNNNVDLVNIGSTDIVDGNHKLTLGLIWNIILHWQVKNVMKNIMAGLQQTNSEKILLSWVRQSTRNYPQVNVINFTTSWSDGLALNALIHSHRPDLFDWNSVVCQQSATQRLEHAFNIARYQLGIEKLLDPEDVDTTYPDKKSILMYITSLFQVLPQQVSIEAIQEVEMLPRPPKVTKEEHFQLHHQMHYSQQITVSLAQGYERTSSPKPRFKSYAYTQAAYVTTSDPTRSPFPSQHLEAPEDKSFGSSLMESEVNLDRYQTALEEVLSWLLSAEDTLQAQGEISNDVEVVKDQFHTHEGYMMDLTAHQGRVGNILQLGSKLIGTGKLSEDEETEVQEQMNLLNSRWECLRVASMEKQSNLHRVLMDLQNQKLKELNDWLTKTEERTRKMEEEPLGPDLEDLKRQVQQHKVLQEDLEQEQVRVNSLTHMVVVVDESSGDHATAALEEQLKVLGDRWANICRWTEDRWVLLQDILLKWQRLTEEQCLFSAWLSEKEDAVNKIHTTGFKDQNEMLSSLQKLAVLKADLEKKKQSMGKLYSLKQDLLSTLKNKSVTQKTEAWLDNFARCWDNLVQKLEKSTAQISQAVTTTQPSLTQTTVMETVTTVTTREQILVKHAQEELPPPPPQKKRQITVDSEIRKRLDVDITELHSWITRSEAVLQSPEFAIFRKEGNFSDLKEKVNAIEREKAEKFRKLQDASRSAQALVEQMVNEGVNADSIKQASEQLNSRWIEFCQLLSERLNWLEYQNNIIAFYNQLQQLEQMTTTAENWLKIQPTTPSEPTAIKSQLKICKDEVNRLSDLQPQIERLKIQSIALKEKGQGPMFLDADFVAFTNHFKQVFSDVQAREKELQTIFDTLPPMRYQETMSAIRTWVQQSETKLSIPQLSVTDYEIMEQRLGELQALQSSLQEQQSGLYYLSTTVKEMSKKAPSEISRKYQSEFEEIEGRWKKLSSQLVEHCQKLEEQMNKLRKIQNHIQTLKKWMAEVDVFLKEEWPALGDSEILKKQLKQCRLLVSDIQTIQPSLNSVNEGGQKIKNEAEPEFASRLETELKELNTQWDHMCQQVYARKEALKGGLEKTVSLQKDLSEMHEWMTQAEEEYLERDFEYKTPDELQKAVEEMKRAKEEAQQKEAKVKLLTESVNSVIAQAPPVAQEALKKELETLTTNYQWLCTRLNGKCKTLEEVWACWHELLSYLEKANKWLNEVEFKLKTTENIPGGAEEISEVLDSLENLMRHSEDNPNQIRILAQTLTDGGVMDELINEELETFNSRWRELHEEAVRRQKLLEQSIQSAQETEKSLHLIQESLTFIDKQLAAYIADKVDAAQMPQEAQKIQSDLTSHEISLEEMKKHNQGKEAAQRVLSQIDVAQKKLQDVSMKFRLFQKPANFEQRLQESKMILDEVKMHLPALETKSVEQEVVQSQLNHCVNLYKSLSEVKSEVEMVIKTGRQIVQKKQTENPKELDERVTALKLHYNELGAKVTERKQQLEKCLKLSRKMRKEMNVLTEWLAATDMELTKRSAVEGMPSNLDSEVAWGKATQKEIEKQKVHLKSITEVGEALKTVLGKKETLVEDKLSLLNSNWIAVTSRAEEWLNLLLEYQKHMETFDQNVDHITKWIIQADTLLDESEKKKPQQKEDVLKRLKAELNDIRPKVDSTRDQAANLMANRGDHCRKLVEPQISELNHRFAAISHRIKTGKASIPLKELEQFNSDIQKLLEPLEAEIQQGVNLKEEDFNKDMDLRSQRRKKALEISHQWYQYKRQADDLLKCLDDIEKKLASLPEPRDERKIKEIDRELQKKKEELNAVRRQAEGLSEDGAAMAVEPTQIQLSKRWREIESKFAQFRRLNFAQIHTVREETMMVMTEDMPLEISYVPSTYLTEITHVSQALLEVEQLLNAPDLCAKDFEDLFKQEESLKNIKDSLQQSSGRIDIIHSKKTAALQSATPVERVKLQEALSQLDFQWEKVNKMYKDRQGRFDRSVEKWRRFHYDIKIFNQWLTEAEQFLRKTQIPENWEHAKYKWYLKELQDGIGQRQTVVRTLNATGEEIIQQSSKTDASILQEKLGSLNLRWQEVCKQLSDRKKRLEEQKNILSEFQRDLNEFVLWLEEADNIASIPLEPGKEQQLKEKLEQVKLLVEELPLRQGILKQLNETGGPVLVSAPISPEEQDKLENKLKQTNLQWIKVSRALPEKQGEIEAQIKDLGQLEKKLEDLEEQLNHLLLWLSPIRNQLEIYNQPNQEGPFDVKETEIAVQAKQPDVEEILSKGQHLYKEKPATQPVKRKLEDLSSEWKAVNRLLQELRAKQPDLAPGLTTIGASPTQTVTLVTQPVVTKETAISKLEMPSSLMLEVPALADFNRAWTELTDWLSLLDQVIKSQRVMVGDLEDINEMIIKQKATMQDLEQRRPQLEELITAAQNLKNKTSNQEARTIITDRIERIQNQWDEVQEHLQNRRQQLNEMLKDSTQWLEAKEEAEQVLGQARAKLESWKEGPYTVDAIQKKITETKQLAKDLRQWQTNVDVANDLALKLLRDYSADDTRKVHMITENINASWRSIHKRVSEREAALEETHRLLQQFPLDLEKFLAWLTEAETTANVLQDATRKERLLEDSKGVKELMKQWQDLQGEIEAHTDVYHNLDENSQKILRSLEGSDDAVLLQRRLDNMNFKWSELRKKSLNIRSHLEASSDQWKRLHLSLQELLVWLQLKDDELSRQAPIGGDFPAVQKQNDVHRAFKRELKTKEPVIMSTLETVRIFLTEQPLEGLEKLYQEPRELPPEERAQNVTRLLRKQAEEVNTEWEKLNLHSADWQRKIDETLERLRELQEATDELDLKLRQAEVIKGSWQPVGDLLIDSLQDHLEKVKALRGEIAPLKENVSHVNDLARQLTTLGIQLSPYNLSTLEDLNTRWKLLQVAVEDRVRQLHEAHRDFGPASQHFLSTSVQGPWERAISPNKVPYYINHETQTTCWDHPKMTELYQSLADLNNVRFSAYRTAMKLRRLQKALCLDLLSLSAACDALDQHNLKQNDQPMDILQIINCLTTIYDRLEQEHNNLVNVPLCVDMCLNWLLNVYDTGRTGRIRVLSFKTGIISLCKAHLEDKYRYLFKQVASSTGFCDQRRLGLLLHDSIQIPRQLGEVASFGGSNIEPSVRSCFQFANNKPEIEAALFLDWMRLEPQSMVWLPVLHRVAAAETAKHQAKCNICKECPIIGFRYRSLKHFNYDICQSCFFSGRVAKGHKMHYPMVEYCTPTTSGEDVRDFAKVLKNKFRTKRYFAKHPRMGYLPVQTVLEGDNMETPVTLINFWPVDSAPASSPQLSHDDTHSRIEHYASRLAEMENSNGSYLNDSISPNESIDDEHLLIQHYCQSLNQDSPLSQPRSPAQILISLESEERGELERILADLEEENRNLQAEYDRLKQQHEHKGLSPLPSPPEMMPTSPQSPRDAELIAEAKLLRQHKGRLEARMQILEDHNKQLESQLHRLRQLLEQPQAEAKVNGTTVSSPSTSLQRSDSSQPMLLRVVGSQTSDSMGEEDLLSPPQDTSTGLEEVMEQLNNSFPSSRGHNVGSLFHMADDLGRAMESLVSVMTDEEGAE

SEQ ID NO: 44 - DNA, 13625 bp, Homo sapiens
actttccccctacaggactcagatctgggaggcaattaccttcggagaaaaacgaataggaaaaactgaagtgttactttttttaaagctgctgaagtttgttggtttctcattgtttttaagcctactggagcaataaagtttgaagaacttttaccaggttttttttatcgctgccttgatatacacttttcaaaatgctttggtgggaagaagtagaggactgttatgaaagagaagatgttcaaaagaaaacattcacaaaatgggtaaatgcacaattttctaagtttgggaagcagcatattgagaacctcttcagtgacctacaggatgggaggcgcctcctagacctcctcgaaggcctgacagggcaaaaactgccaaaagaaaaaggatccacaagagttcatgccctgaacaatgtcaacaaggcactgcgggttttgcagaacaataatgttgatttagtgaatattggaagtactgacatcgtagatggaaatcataaactgactcttggtttgatttggaatataatcctccactggcaggtcaaaaatgtaatgaaaaatatcatggctggattgcaacaaaccaacagtgaaaagattctcctgagctgggtccgacaatcaactcgtaattatccacaggttaatgtaatcaacttcaccaccagctggtctgatggcctggctttgaatgctctcatccatagtcataggccagacctatttgactggaatagtgtggtttgccagcagtcagccacacaacgactggaacatgcattcaacatcgccagatatcaattaggcatagagaaactactcgatcctgaagatgttgataccacctatccagataagaagtccatcttaatgtacatcacatcactcttccaagttttgcctcaacaagtgagcattgaagccatccaggaagtggaaatgttgccaaggccacctaaagtgactaaagaagaacattttcagttacatcatcaaatgcactattctcaacagatcacggtcagtctagcacagggatatgagagaacttcttcccctaagcctcgattcaagagctatgcctacacacaggctgcttatgtcaccacctctgaccctacacggagcccatttccttcacagcatttggaagctcctgaagacaagtcatttggcagttcattgatggagagtgaagtaaacctggaccgttatcaaacagctttagaagaagtattatcgtggcttctttctgctgaggacacattgcaagcacaaggagagatttctaatgatgtggaagtggtgaaagaccagtttcatactcatgaggggtacatgatggatttgacagcccatcagggccgggttggtaatattctacaattgggaagtaagctgattggaacaggaaaattatcagaagatgaagaaactgaagtacaagagcagatgaatctcctaaattcaagatgggaatgcctcagggtagctagcatggaaaaacaaagcaatttacatagagttttaatggatctccagaatcagaaactgaaagagttgaatgactggctaacaaaaacagaagaaagaacaaggaaaatggaggaagagcctcttggacctgatcttgaagacctaaaacgccaagtacaacaacataaggtgcttcaagaagatctagaacaagaacaagtcagggtcaattctctcactcacatggtggtggtagttgatgaatctagtggagatcacgcaactgctgctttggaagaacaacttaaggtattgggagatcgatgggcaaacatctgtagatggacagaagaccgctgggttcttttacaagacatccttctcaaatggcaacgtcttactgaagaacagtgcctttttagtgcatggctttcagaaaaagaagatgcagtgaacaagattcacacaactggctttaaagatcaaaatgaaatgttatcaagtcttcaaaaactggccgttttaaaagcggatctagaaaagaaaaagcaatccatgggcaaactgtattcactcaaacaagatcttctttcaacactgaagaataagtcagtgacccagaagacggaagcatggctggataactttgcccggtgttgggataatttagtccaaaaacttgaaaagagtacagcacagatttcacaggctgtcaccaccactcagccatcactaacacagacaactgtaatggaaacagtaactacggtgaccacaagggaacagatcctggtaaagcatgctcaagaggaacttccaccaccacctccccaaaagaagaggcagattactgtggattctgaaattaggaaaaggttggatgttgatataactgaacttcacagctggattactcgctcagaagctgtgttgcagagtcctgaatttgcaatctttcggaaggaaggcaacttctcagacttaaaagaaaaagtcaatgccatagagcgagaaaaagctgagaagttcagaaaactgcaagatgccagcagatcagctcaggccctggtggaacagatggtgaatgagggtgttaatgcagatagcatcaaacaagcctcagaacaactgaacagccggtggatcgaattctgccagttgctaagtgagagacttaactggctggagtatcagaacaacatcatcgctttctataatcagctacaacaattggagcagatgacaactactgctgaaaactggttgaaaatccaacccaccaccccatcagagccaacagcaattaaaagtcagttaaaaatttgtaaggatgaagtcaaccggctatcagatcttcaacctcaaattgaacgattaaaaattcaaagcatagccctgaaagagaaaggacaaggacccatgttcctggatgcagactttgtggcctttacaaatcattttaagcaagtcttttctgatgtgcaggccagagagaaagagctacagacaatttttgacactttgccaccaatgcgctatcaggagaccatgagtgccatcaggacatgggtccagcagtcagaaaccaaactctccatacctcaacttagtgtcaccgactatgaaatcatggagcagagactcggggaattgcaggctttacaaagttctctgcaagagcaacaaagtggcctatactatctcagcaccactgtgaaagagatgtcgaagaaagcgccctctgaaattagccggaaatatcaatcagaatttgaagaaattgagggacgctggaagaagctctcctcccagctggttgagcattgtcaaaagctagaggagcaaatgaataaactccgaaaaattcagaatcacatacaaaccctgaagaaatggatggctgaagttgatgtttttctgaaggaggaatggcctgcccttggggattcagaaattctaaaaaagcagctgaaacagtgcagacttttagtcagtgatattcagacaattcagcccagtctaaacagtgtcaatgaaggtgggcagaagataaagaatgaagcagagccagagtttgcttcgagacttgagacagaactcaaagaacttaacactcagtgggatcacatgtgccaacaggtctatgccagaaaggaggccttgaagggaggtttggagaaaactgtaagcctccagaaagatctatcagagatgcacgaatggatgacacaagctgaagaagagtatcttgagagagattttgaatataaaactccagatgaattacagaaagcagttgaagagatgaagagagctaaagaagaggcccaacaaaaagaagcgaaagtgaaactccttactgagtctgtaaatagtgtcatagctcaagctccacctgtagcacaagaggccttaaaaaaggaacttgaaactctaaccaccaactaccagtggctctgcactaggctgaatgggaaatgcaagactttggaagaagtttgggcatgttggcatgagttattgtcatacttggagaaagcaaacaagtggctaaatgaagtagaatttaaacttaaaaccactgaaaacattcctggcggagctgaggaaatctctgaggtgctagattcacttgaaaatttgatgcgacattcagaggataacccaaatcagattcgcatattggcacagaccctaacagatggcggagtcatggatgagctaatcaatgaggaacttgagacatttaattctcgttggagggaactacatgaagaggctgtaaggaggcaaaagttgcttgaacagagcatccagtctgcccaggagactgaaaaatccttacacttaatccaggagtccctcacattcattgacaagcagttggcagcttatattgcagacaaggtggacgcagctcaaatgcctcaggaagcccagaaaatccaatctgatttgacaagtcatgagatcagtttagaagaaatgaagaaacataatcaggggaaggaggctgcccaaagagtcctgtctcagattgatgttgcacagaaaaaattacaagatgtctccatgaagtttcgattattccagaaaccagccaattttgagcagcgtctacaagaaagtaagatgattttagatgaagtgaagatgcacttgcctgcattggaaacaaagagtgtggaacaggaagtagtacagtcacagctaaatcattgtgtgaacttgtataaaagtctgagtgaagtgaagtctgaagtggaaatggtgataaagactggacgtcagattgtacagaaaaagcagacggaaaatcccaaagaacttgatgaaagagtaacagctttgaaattgcattataatgagctgggagcaaaggtaacagaaagaaagcaacagttggagaaatgcttgaaattgtcccgtaagatgcgaaaggaaatgaatgtcttgacagaatggctggcagctacagatatggaattgacaaagagatcagcagttgaaggaatgcctagtaatttggattctgaagttgcctggggaaaggctactcaaaaagagattgagaaacagaaggtgcacctgaagagtatcacagaggtaggagaggccttgaaaacagttttgggcaagaaggagacgttggtggaagataaactcagtcttctgaatagtaactggatagctgtcacctcccgagcagaagagtggttaaatcttttgttggaataccagaaacacatggaaacttttgaccagaatgtggaccacatcacaaagtggatcattcaggctgacacacttttggatgaatcagagaaaaagaaaccccagcaaaaagaagacgtgcttaagcgtttaaaggcagaactgaatgacatacgcccaaaggtggactctacacgtgaccaagcagcaaacttgatggcaaaccgcggtgaccactgcaggaaattagtagagccccaaatctcagagctcaaccatcgatttgcagccatttcacacagaattaagactggaaaggcctccattcctttgaaggaattggagcagtttaactcagatatacaaaaattgcttgaaccactggaggctgaaattcagcagggggtgaatctgaaagaggaagacttcaataaagatatgaatgaagacaatgagggtactgtaaaagaattgttgcaaagaggagacaacttacaacaaagaatcacagatgagagaaagcgagaggaaataaagataaaacagcagctgttacagacaaaacataatgctctcaaggatttgaggtctcaaagaagaaaaaaggctctagaaatttctcatcagtggtatcagtacaagaggcaggctgatgatctcctgaaatgcttggatgacattgaaaaaaaattagccagcctacctgagcccagagatgaaaggaaaataaaggaaattgatcgggaattgcagaagaagaaagaggagctgaatgcagtgcgtaggcaagctgagggcttgtctgaggatggggccgcaatggcagtggagccaactcagatccagctcagcaagcgctggcgggaaattgagagcaaatttgctcagtttcgaagactcaactttgcacaaattcacactgtccgtgaagaaacgatgatggtgatgactgaagacatgcctttggaaatttcttatgtgccttctacttatttgactgaaatcactcatgtctcacaagccctattagaagtggaacaacttctcaatgctcctgacctctgtgctaaggactttgaagatctctttaagcaagaggagtctctgaagaatataaaagatagtctacaacaaagctcaggtcggattgacattattcatagcaagaagacagcagcattgcaaagtgcaacgcctgtggaaagggtgaagctacaggaagctctctcccagcttgatttccaatgggaaaaagttaacaaaatgtacaaggaccgacaagggcgatttgacagatctgttgagaaatggcggcgttttcattatgatataaagatatttaatcagtggctaacagaagctgaacagtttctcagaaagacacaaattcctgagaattgggaacatgctaaatacaaatggtatcttaaggaactccaggatggcattgggcagcggcaaactgttgtcagaacattgaatgcaactggggaagaaataattcagcaatcctcaaaaacagatgccagtattctacaggaaaaattgggaagcctgaatctgcggtggcaggaggtctgcaaacagctgtcagacagaaaaaagaggctagaagaacaaaagaatatcttgtcagaatttcaaagagatttaaatgaatttgttttatggttggaggaagcagataacattgctagtatcccacttgaacctggaaaagagcagcaactaaaagaaaagcttgagcaagtcaagttactggtggaagagttgcccctgcgccagggaattctcaaacaattaaatgaaactggaggacccgtgcttgtaagtgctcccataagcccagaagagcaagataaacttgaaaataagctcaagcagacaaatctccagtggataaaggtttccagagctttacctgagaaacaaggagaaattgaagctcaaataaaagaccttgggcagcttgaaaaaaagcttgaagaccttgaagagcagttaaatcatctgctgctgtggttatctcctattaggaatcagttggaaatttataaccaaccaaaccaagaaggaccatttgacgttaaggaaactgaaatagcagttcaagctaaacaaccggatgtggaagagattttgtctaaagggcagcatttgtacaaggaaaaaccagccactcagccagtgaagaggaagttagaagatctgagctctgagtggaaggcggtaaaccgtttacttcaagagctgagggcaaagcagcctgacctagctcctggactgaccactattggagcctctcctactcagactgttactctggtgacacaacctgtggttactaaggaaactgccatctccaaactagaaatgccatcttccttgatgttggaggtacctgctctggcagatttcaaccgggcttggacagaacttaccgactggctttctctgcttgatcaagttataaaatcacagagggtgatggtgggtgaccttgaggatatcaacgagatgatcatcaagcagaaggcaacaatgcaggatttggaacagaggcgtccccagttggaagaactcattaccgctgcccaaaatttgaaaaacaagaccagcaatcaagaggctagaacaatcattacggatcgaattgaaagaattcagaatcagtgggatgaagtacaagaacaccttcagaaccggaggcaacagttgaatgaaatgttaaaggattcaacacaatggctggaagctaaggaagaagctgagcaggtcttaggacaggccagagccaagcttgagtcatggaaggagggtccctatacagtagatgcaatccaaaagaaaatcacagaaaccaagcagttggccaaagacctccgccagtggcagacaaatgtagatgtggcaaatgacttggccctgaaacttctccgggattattctgcagatgataccagaaaagtccacatgataacagagaatatcaatgcctcttggagaagcattcataaaagggtgagtgagcgagaggctgctttggaagaaactcatagattactgcaacagttccccctggacctggaaaagtttcttgcctggcttacagaagctgaaacaactgccaatgtcctacaggatgctacccgtaaggaaaggctcctagaagactccaagggagtaaaagagctgatgaaacaatggcaagacctccaaggtgaaattgaagctcacacagatgtttatcacaacctggatgaaaacagccaaaaaatcctgagatccctggaaggttccgatgatgcagtcctgttacaaagacgtttggataacatgaacttcaagtggagtgaacttcggaaaaagtctctcaacattaggtcccatttggaagccagttctgaccagtggaagcgtctgcacctttctctgcaggaacttctggtgtggctacagctgaaagatgatgaattaagccggcaggcacctattggaggcgactttccagcagttcagaagcagaacgatgtacatagggccttcaagagggaattgaaaactaaagaacctgtaatcatgagtactcttgagactgtacgaatatttctgacagagcagcctttggaaggactagagaaactctaccaggagcccagagagctgcctcctgaggagagagcccagaatgtcactcggcttctacgaaagcaggctgaggaggtcaatactgagtgggaaaaattgaacctgcactccgctgactggcagagaaaaatagatgagacccttgaaagactccgggaacttcaagaggccacggatgagctggacctcaagctgcgccaagctgaggtgatcaagggatcctggcagcccgtgggcgatctcctcattgactctctccaagatcacctcgagaaagtcaaggcacttcgaggagaaattgcgcctctgaaagagaacgtgagccacgtcaatgaccttgctcgccagcttaccactttgggcattcagctctcaccgtataacctcagcactctggaagacctgaacaccagatggaagcttctgcaggtggccgtcgaggaccgagtcaggcagctgcatgaagcccacagggactttggtccagcatctcagcactttctttccacgtctgtccagggtccctgggagagagccatctcgccaaacaaagtgccctactatatcaaccacgagactcaaacaacttgctgggaccatcccaaaatgacagagctctaccagtctttagctgacctgaataatgtcagattctcagcttataggactgccatgaaactccgaagactgcagaaggccctttgcttggatctcttgagcctgtcagctgcatgtgatgccttggaccagcacaacctcaagcaaaatgaccagcccatggatatcctgcagattattaattgtttgaccactatttatgaccgcctggagcaagagcacaacaatttggtcaacgtccctctctgcgtggatatgtgtctgaactggctgctgaatgtttatgatacgggacgaacagggaggatccgtgtcctgtcttttaaaactggcatcatttccctgtgtaaagcacatttggaagacaagtacagataccttttcaagcaagtggcaagttcaacaggattttgtgaccagcgcaggctgggcctccttctgcatgattctatccaaattccaagacagttgggtgaagttgcatcctttgggggcagtaacattgagccaagtgtccggagctgcttccaatttgctaataataagccagagatcgaagcggccctcttcctagactggatgagactggaaccccagtccatggtgtggctgcccgtcctgcacagagtggctgctgcagaaactgccaagcatcaggccaaatgtaacatctgcaaagagtgtccaatcattggattcaggtacaggagtctaaagcactttaattatgacatctgccaaagctgctttttttctggtcgagttgcaaaaggccataaaatgcactatcccatggtggaatattgcactccgactacatcaggagaagatgttcgagactttgccaaggtactaaaaaacaaatttcgaaccaaaaggtattttgcgaagcatccccgaatgggctacctgccagtgcagactgtcttagagggggacaacatggaaacgaatctgcaagcagaatatgaccgtctaaagcagcagcacgaacataaaggcctgtccccactgccgtcccctcctgaaatgatgcccacctctccccagagtccccgggatgctgagctcattgctgaggccaagctactgcgtcaacacaaaggccgcctggaagccaggatgcaaatcctggaagaccacaataaacagctggagtcacagttacacaggctaaggcagctgctggagcaaccccaggcagaggccaaagtgaatggcacaacggtgtcctctccttctacctctctacagaggtccgacagcagtcagcctatgctgctccgagtggttggcagtcaaacttcggactccatgggtgaggaagatcttctcagtcctccccaggacacaagcacagggttagaggaggtgatggagcaactcaacaactccttccctagttcaagaggaagaaatacccctggaaagccaatgagagaggacacaatgtaggaagtcttttccacatggcagatgatttgggcagagcgatggagtccttagtatcagtcatgacagatgaagaaggagcagaataaatgttttacaactcctgattcccgcatggtttttataatattcatacaacaaagaggattagacagtaagagtttacaagaaataaatctatatttttgtgaagggtagtggtattatactgtagatttcagtagtttctaagtctgttattgttttgttaacaatggcaggttttacacgtctatgcaattgtacaaaaaagttataagaaaactacatgtaaaatcttgatagctaaataacttgccatttctttatatggaacgcattttgggttgtttaaaaatttataacagttataaagaaagattgtaaactaaagtgtgctttataaaaaaaagttgtttataaaaacccctaaaaacaaaacaaacacacacacacacacatacacacacacacacaaaactttgaggcagcgcattgttttgcatccttttggcgtgatatccatatgaaattcatggctttttctttttttgcatattaaagataagacttcctctaccaccacaccaaatgactactacacactgctcatttgagaactgtcagctgagtggggcaggcttgagttttcatttcatatatctatatgtctataagtatataaatactatagttatatagataaagagatacgaatttctatagactgactttttccattttttaaatgttcatgtcacatcctaatagaaagaaattacttctagtcagtcatccaggcttacctgcttggtctagaatggatttttcccggagccggaagccaggaggaaactacaccacactaaaacattgtctacagctccagatgtttctcattttaaacaactttccactgacaacgaaagtaaagtaaagtattggatttttttaaagggaacatgtgaatgaatacacaggacttattatatcagagtgagtaatcggttggttggttgattgattgattgattgatacattcagcttcctgctgctagcaatgccacgatttagatttaatgatgcttcagtggaaatcaatcagaaggtattctgaccttgtgaacatcagaaggtattttttaactcccaagcagtagcaggacgatgatagggctggagggctatggattcccagcccatccctgtgaaggagtaggccactctttaagtgaaggattggatgattgttcataatacataaagttctctgtaattacaactaaattattatgccctcttctcacagtcaaaaggaactgggtggtttggtttttgttgcttttttagatttattgtcccatgtgggatgagtttttaaatgccacaagacataatttaaaataaataaactttgggaaaaggtgtaaaacagtagccccatcacatttgtgatactgacaggtatcaacccagaagcccatgaactgtgtttccatcctttgcatttctctgcgagtagttccacacaggtttgtaagtaagtaagaaagaaggcaaattgattcaaatgttacaaaaaaacccttcttggtggattagacaggttaaatatataaacaaacaaacaaaaattgctcaaaaaagaggagaaaagctcaagaggaaaagctaaggactggtaggaaaaagctttactctttcatgccattttatttctttttgatttttaaatcattcattcaatagataccaccgtgtgacctataattttgcaaatctgttacctctgacatcaagtgtaattagcttttggagagtgggctgacatcaagtgtaattagcttttggagagtgggttttgtccattattaataattaattaattaacatcaaacacggcttctcatgctatttctacctcactttggttttggggtgttcctgataattgtgcacacctgagttcacagcttcaccacttgtccattgcgttattttctttttcctttataattctttctttttccttcataattttcaaaagaaaacccaaagctctaaggtaacaaattaccaaattacatgaagatttggtttttgtcttgcatttttttcctttatgtgacgctggaccttttctttacccaaggatttttaaaactcagatttaaaacaaggggttactttacatcctactaagaagtttaagtaagtaagtttcattctaaaatcagaggtaaatagagtgcataaataattttgttttaatctttttgtttttcttttagacacattagctctggagtgagtctgtcataatatttgaacaaaaattgagagctttattgctgcattttaagcataattaatttggacattatttcgtgttgtgttctttataaccaccaagtattaaactgtaaatcataatgtaactgaagcataaacatcacatggcatgttttgtcattgttttcaggtactgagttcttacttgagtatcataatatattgtgttttaacaccaacactgtaacatttacgaattatttttttaaacttcagttttactgcattttcacaacatatcagacttcaccaaatatatgccttactattgtattatagtactgctttactgtgtatctcaataaagcacgcagttatgttacaaaaaagta

SEQ ID NO: 45 - protein, 3575 aa, Homo sapiens
MLWWEEVEDCYEREDVQKKTFTKWVNAQFSKFGKQHIENLFSDLQDGRRLLDLLEGLTGQKLPKEKGSTRVHALNNVNKALRVLQNNNVDLVNIGSTDIVDGNHKLTLGLIWNIILHWQVKNVMKNIMAGLQQTNSEKILLSWVRQSTRNYPQVNVINFTTSWSDGLALNALIHSHRPDLFDWNSVVCQQSATQRLEHAFNIARYQLGIEKLLDPEDVDTTYPDKKSILMYITSLFQVLPQQVSIEAIQEVEMLPRPPKVTKEEHFQLHHQMHYSQQITVSLAQGYERTSSPKPRFKSYAYTQAAYVTTSDPTRSPFPSQHLEAPEDKSFGSSLMESEVNLDRYQTALEEVLSWLLSAEDTLQAQGEISNDVEVVKDQFHTHEGYMMDLTAHQGRVGNILQLGSKLIGTGKLSEDEETEVQEQMNLLNSRWECLRVASMEKQSNLHRVLMDLQNQKLKELNDWLTKTEERTRKMEEEPLGPDLEDLKRQVQQHKVLQEDLEQEQVRVNSLTHMVVVVDESSGDHATAALEEQLKVLGDRWANICRWTEDRWVLLQDILLKWQRLTEEQCLFSAWLSEKEDAVNKIHTTGFKDQNEMLSSLQKLAVLKADLEKKKQSMGKLYSLKQDLLSTLKNKSVTQKTEAWLDNFARCWDNLVQKLEKSTAQISQAVTTTQPSLTQTTVMETVTTVTTREQILVKHAQEELPPPPPQKKRQITVDSEIRKRLDVDITELHSWITRSEAVLQSPEFAIFRKEGNFSDLKEKVNAIEREKAEKFRKLQDASRSAQALVEQMVNEGVNADSIKQASEQLNSRWIEFCQLLSERLNWLEYQNNIIAFYNQLQQLEQMTTTAENWLKIQPTTPSEPTAIKSQLKICKDEVNRLSDLQPQIERLKIQSIALKEKGQGPMFLDADFVAFTNHFKQVFSDVQAREKELQTIFDTLPPMRYQETMSAIRTWVQQSETKLSIPQLSVTDYEIMEQRLGELQALQSSLQEQQSGLYYLSTTVKEMSKKAPSEISRKYQSEFEEIEGRWKKLSSQLVEHCQKLEEQMNKLRKIQNHIQTLKKWMAEVDVFLKEEWPALGDSEILKKQLKQCRLLVSDIQTIQPSLNSVNEGGQKIKNEAEPEFASRLETELKELNTQWDHMCQQVYARKEALKGGLEKTVSLQKDLSEMHEWMTQAEEEYLERDFEYKTPDELQKAVEEMKRAKEEAQQKEAKVKLLTESVNSVIAQAPPVAQEALKKELETLTTNYQWLCTRLNGKCKTLEEVWACWHELLSYLEKANKWLNEVEFKLKTTENIPGGAEEISEVLDSLENLMRHSEDNPNQIRILAQTLTDGGVMDELINEELETFNSRWRELHEEAVRRQKLLEQSIQSAQETEKSLHLIQESLTFIDKQLAAYIADKVDAAQMPQEAQKIQSDLTSHEISLEEMKKHNQGKEAAQRVLSQIDVAQKKLQDVSMKFRLFQKPANFEQRLQESKMILDEVKMHLPALETKSVEQEVVQSQLNHCVNLYKSLSEVKSEVEMVIKTGRQIVQKKQTENPKELDERVTALKLHYNELGAKVTERKQQLEKCLKLSRKMRKEMNVLTEWLAATDMELTKRSAVEGMPSNLDSEVAWGKATQKEIEKQKVHLKSITEVGEALKTVLGKKETLVEDKLSLLNSNWIAVTSRAEEWLNLLLEYQKHMETFDQNVDHITKWIIQADTLLDESEKKKPQQKEDVLKRLKAELNDIRPKVDSTRDQAANLMANRGDHCRKLVEPQISELNHRFAAISHRIKTGKASIPLKELEQFNSDIQKLLEPLEAEIQQGVNLKEEDFNKDMNEDNEGTVKELLQRGDNLQQRITDERKREEIKIKQQLLQTKHNALKDLRSQRRKKALEISHQWYQYKRQADDLLKCLDDIEKKLASLPEPRDERKIKEIDRELQKKKEELNAVRRQAEGLSEDGAAMAVEPTQIQLSKRWREIESKFAQFRRLNFAQIHTVREETMMVMTEDMPLEISYVPSTYLTEITHVSQALLEVEQLLNAPDLCAKDFEDLFKQEESLKNIKDSLQQSSGRIDIIHSKKTAALQSATPVERVKLQEALSQLDFQWEKVNKMYKDRQGRFDRSVEKWRRFHYDIKIFNQWLTEAEQFLRKTQIPENWEHAKYKWYLKELQDGIGQRQTVVRTLNATGEEIIQQSSKTDASILQEKLGSLNLRWQEVCKQLSDRKKRLEEQKNILSEFQRDLNEFVLWLEEADNIASIPLEPGKEQQLKEKLEQVKLLVEELPLRQGILKQLNETGGPVLVSAPISPEEQDKLENKLKQTNLQWIKVSRALPEKQGEIEAQIKDLGQLEKKLEDLEEQLNHLLLWLSPIRNQLEIYNQPNQEGPFDVKETEIAVQAKQPDVEEILSKGQHLYKEKPATQPVKRKLEDLSSEWKAVNRLLQELRAKQPDLAPGLTTIGASPTQTVTLVTQPVVTKETAISKLEMPSSLMLEVPALADFNRAWTELTDWLSLLDQVIKSQRVMVGDLEDINEMIIKQKATMQDLEQRRPQLEELITAAQNLKNKTSNQEARTIITDRIERIQNQWDEVQEHLQNRRQQLNEMLKDSTQWLEAKEEAEQVLGQARAKLESWKEGPYTVDAIQKKITETKQLAKDLRQWQTNVDVANDLALKLLRDYSADDTRKVHMITENINASWRSIHKRVSEREAALEETHRLLQQFPLDLEKFLAWLTEAETTANVLQDATRKERLLEDSKGVKELMKQWQDLQGEIEAHTDVYHNLDENSQKILRSLEGSDDAVLLQRRLDNMNFKWSELRKKSLNIRSHLEASSDQWKRLHLSLQELLVWLQLKDDELSRQAPIGGDFPAVQKQNDVHRAFKRELKTKEPVIMSTLETVRIFLTEQPLEGLEKLYQEPRELPPEERAQNVTRLLRKQAEEVNTEWEKLNLHSADWQRKIDETLERLRELQEATDELDLKLRQAEVIKGSWQPVGDLLIDSLQDHLEKVKALRGEIAPLKENVSHVNDLARQLTTLGIQLSPYNLSTLEDLNTRWKLLQVAVEDRVRQLHEAHRDFGPASQHFLSTSVQGPWERAISPNKVPYYINHETQTTCWDHPKMTELYQSLADLNNVRFSAYRTAMKLRRLQKALCLDLLSLSAACDALDQHNLKQNDQPMDILQIINCLTTIYDRLEQEHNNLVNVPLCVDMCLNWLLNVYDTGRTGRIRVLSFKTGIISLCKAHLEDKYRYLFKQVASSTGFCDQRRLGLLLHDSIQIPRQLGEVASFGGSNIEPSVRSCFQFANNKPEIEAALFLDWMRLEPQSMVWLPVLHRVAAAETAKHQAKCNICKECPIIGFRYRSLKHFNYDICQSCFFSGRVAKGHKMHYPMVEYCTPTTSGEDVRDFAKVLKNKFRTKRYFAKHPRMGYLPVQTVLEGDNMETNLQAEYDRLKQQHEHKGLSPLPSPPEMMPTSPQSPRDAELIAEAKLLRQHKGRLEARMQILEDHNKQLESQLHRLRQLLEQPQAEAKVNGTTVSSPSTSLQRSDSSQPMLLRVVGSQTSDSMGEEDLLSPPQDTSTGLEEVMEQLNNSFPSSRGRNTPGKPMREDTM

SEQ ID NO: 46 - DNA, 13916 bp, Homo sapiens
actttccccctacaggactcagatctgggaggcaattaccttcggagaaaaacgaataggaaaaactgaagtgttactttttttaaagctgctgaagtttgttggtttctcattgtttttaagcctactggagcaataaagtttgaagaacttttaccaggttttttttatcgctgccttgatatacacttttcaaaatgctttggtgggaagaagtagaggactgttatgaaagagaagatgttcaaaagaaaacattcacaaaatgggtaaatgcacaattttctaagtttgggaagcagcatattgagaacctcttcagtgacctacaggatgggaggcgcctcctagacctcctcgaaggcctgacagggcaaaaactgccaaaagaaaaaggatccacaagagttcatgccctgaacaatgtcaacaaggcactgcgggttttgcagaacaataatgttgatttagtgaatattggaagtactgacatcgtagatggaaatcataaactgactcttggtttgatttggaatataatcctccactggcaggtcaaaaatgtaatgaaaaatatcatggctggattgcaacaaaccaacagtgaaaagattctcctgagctgggtccgacaatcaactcgtaattatccacaggttaatgtaatcaacttcaccaccagctggtctgatggcctggctttgaatgctctcatccatagtcataggccagacctatttgactggaatagtgtggtttgccagcagtcagccacacaacgactggaacatgcattcaacatcgccagatatcaattaggcatagagaaactactcgatcctgaagatgttgataccacctatccagataagaagtccatcttaatgtacatcacatcactcttccaagttttgcctcaacaagtgagcattgaagccatccaggaagtggaaatgttgccaaggccacctaaagtgactaaagaagaacattttcagttacatcatcaaatgcactattctcaacagatcacggtcagtctagcacagggatatgagagaacttcttcccctaagcctcgattcaagagctatgcctacacacaggctgcttatgtcaccacctctgaccctacacggagcccatttccttcacagcatttggaagctcctgaagacaagtcatttggcagttcattgatggagagtgaagtaaacctggaccgttatcaaacagctttagaagaagtattatcgtggcttctttctgctgaggacacattgcaagcacaaggagagatttctaatgatgtggaagtggtgaaagaccagtttcatactcatgaggggtacatgatggatttgacagcccatcagggccgggttggtaatattctacaattgggaagtaagctgattggaacaggaaaattatcagaagatgaagaaactgaagtacaagagcagatgaatctcctaaattcaagatgggaatgcctcagggtagctagcatggaaaaacaaagcaatttacatagagttttaatggatctccagaatcagaaactgaaagagttgaatgactggctaacaaaaacagaagaaagaacaaggaaaatggaggaagagcctcttggacctgatcttgaagacctaaaacgccaagtacaacaacataaggtgcttcaagaagatctagaacaagaacaagtcagggtcaattctctcactcacatggtggtggtagttgatgaatctagtggagatcacgcaactgctgctttggaagaacaacttaaggtattgggagatcgatgggcaaacatctgtagatggacagaagaccgctgggttcttttacaagacatccttctcaaatggcaacgtcttactgaagaacagtgcctttttagtgcatggctttcagaaaaagaagatgcagtgaacaagattcacacaactggctttaaagatcaaaatgaaatgttatcaagtcttcaaaaactggccgttttaaaagcggatctagaaaagaaaaagcaatccatgggcaaactgtattcactcaaacaagatcttctttcaacactgaagaataagtcagtgacccagaagacggaagcatggctggataactttgcccggtgttgggataatttagtccaaaaacttgaaaagagtacagcacagatttcacaggctgtcaccaccactcagccatcactaacacagacaactgtaatggaaacagtaactacggtgaccacaagggaacagatcctggtaaagcatgctcaagaggaacttccaccaccacctccccaaaagaagaggcagattactgtggattctgaaattaggaaaaggttggatgttgatataactgaacttcacagctggattactcgctcagaagctgtgttgcagagtcctgaatttgcaatctttcggaaggaaggcaacttctcagacttaaaagaaaaagtcaatgccatagagcgagaaaaagctgagaagttcagaaaactgcaagatgccagcagatcagctcaggccctggtggaacagatggtgaatgagggtgttaatgcagatagcatcaaacaagcctcagaacaactgaacagccggtggatcgaattctgccagttgctaagtgagagacttaactggctggagtatcagaacaacatcatcgctttctataatcagctacaacaattggagcagatgacaactactgctgaaaactggttgaaaatccaacccaccaccccatcagagccaacagcaattaaaagtcagttaaaaatttgtaaggatgaagtcaaccggctatcagatcttcaacctcaaattgaacgattaaaaattcaaagcatagccctgaaagagaaaggacaaggacccatgttcctggatgcagactttgtggcctttacaaatcattttaagcaagtcttttctgatgtgcaggccagagagaaagagctacagacaatttttgacactttgccaccaatgcgctatcaggagaccatgagtgccatcaggacatgggtccagcagtcagaaaccaaactctccatacctcaacttagtgtcaccgactatgaaatcatggagcagagactcggggaattgcaggctttacaaagttctctgcaagagcaacaaagtggcctatactatctcagcaccactgtgaaagagatgtcgaagaaagcgccctctgaaattagccggaaatatcaatcagaatttgaagaaattgagggacgctggaagaagctctcctcccagctggttgagcattgtcaaaagctagaggagcaaatgaataaactccgaaaaattcagaatcacatacaaaccctgaagaaatggatggctgaagttgatgtttttctgaaggaggaatggcctgcccttggggattcagaaattctaaaaaagcagctgaaacagtgcagacttttagtcagtgatattcagacaattcagcccagtctaaacagtgtcaatgaaggtgggcagaagataaagaatgaagcagagccagagtttgcttcgagacttgagacagaactcaaagaacttaacactcagtgggatcacatgtgccaacaggtctatgccagaaaggaggccttgaagggaggtttggagaaaactgtaagcctccagaaagatctatcagagatgcacgaatggatgacacaagctgaagaagagtatcttgagagagattttgaatataaaactccagatgaattacagaaagcagttgaagagatgaagagagctaaagaagaggcccaacaaaaagaagcgaaagtgaaactccttactgagtctgtaaatagtgtcatagctcaagctccacctgtagcacaagaggccttaaaaaaggaacttgaaactctaaccaccaactaccagtggctctgcactaggctgaatgggaaatgcaagactttggaagaagtttgggcatgttggcatgagttattgtcatacttggagaaagcaaacaagtggctaaatgaagtagaatttaaacttaaaaccactgaaaacattcctggcggagctgaggaaatctctgaggtgctagattcacttgaaaatttgatgcgacattcagaggataacccaaatcagattcgcatattggcacagaccctaacagatggcggagtcatggatgagctaatcaatgaggaacttgagacatttaattctcgttggagggaactacatgaagaggctgtaaggaggcaaaagttgcttgaacagagcatccagtctgcccaggagactgaaaaatccttacacttaatccaggagtccctcacattcattgacaagcagttggcagcttatattgcagacaaggtggacgcagctcaaatgcctcaggaagcccagaaaatccaatctgatttgacaagtcatgagatcagtttagaagaaatgaagaaacataatcaggggaaggaggctgcccaaagagtcctgtctcagattgatgttgcacagaaaaaattacaagatgtctccatgaagtttcgattattccagaaaccagccaattttgagcagcgtctacaagaaagtaagatgattttagatgaagtgaagatgcacttgcctgcattggaaacaaagagtgtggaacaggaagtagtacagtcacagctaaatcattgtgtgaacttgtataaaagtctgagtgaagtgaagtctgaagtggaaatggtgataaagactggacgtcagattgtacagaaaaagcagacggaaaatcccaaagaacttgatgaaagagtaacagctttgaaattgcattataatgagctgggagcaaaggtaacagaaagaaagcaacagttggagaaatgcttgaaattgtcccgtaagatgcgaaaggaaatgaatgtcttgacagaatggctggcagctacagatatggaattgacaaagagatcagcagttgaaggaatgcctagtaatttggattctgaagttgcctggggaaaggctactcaaaaagagattgagaaacagaaggtgcacctgaagagtatcacagaggtaggagaggccttgaaaacagttttgggcaagaaggagacgttggtggaagataaactcagtcttctgaatagtaactggatagctgtcacctcccgagcagaagagtggttaaatcttttgttggaataccagaaacacatggaaacttttgaccagaatgtggaccacatcacaaagtggatcattcaggctgacacacttttggatgaatcagagaaaaagaaaccccagcaaaaagaagacgtgcttaagcgtttaaaggcagaactgaatgacatacgcccaaaggtggactctacacgtgaccaagcagcaaacttgatggcaaaccgcggtgaccactgcaggaaattagtagagccccaaatctcagagctcaaccatcgatttgcagccatttcacacagaattaagactggaaaggcctccattcctttgaaggaattggagcagtttaactcagatatacaaaaattgcttgaaccactggaggctgaaattcagcagggggtgaatctgaaagaggaagacttcaataaagatatgaatgaagacaatgagggtactgtaaaagaattgttgcaaagaggagacaacttacaacaaagaatcacagatgagagaaagcgagaggaaataaagataaaacagcagctgttacagacaaaacataatgctctcaaggatttgaggtctcaaagaagaaaaaaggctctagaaatttctcatcagtggtatcagtacaagaggcaggctgatgatctcctgaaatgcttggatgacattgaaaaaaaattagccagcctacctgagcccagagatgaaaggaaaataaaggaaattgatcgggaattgcagaagaagaaagaggagctgaatgcagtgcgtaggcaagctgagggcttgtctgaggatggggccgcaatggcagtggagccaactcagatccagctcagcaagcgctggcgggaaattgagagcaaatttgctcagtttcgaagactcaactttgcacaaattcacactgtccgtgaagaaacgatgatggtgatgactgaagacatgcctttggaaatttcttatgtgccttctacttatttgactgaaatcactcatgtctcacaagccctattagaagtggaacaacttctcaatgctcctgacctctgtgctaaggactttgaagatctctttaagcaagaggagtctctgaagaatataaaagatagtctacaacaaagctcaggtcggattgacattattcatagcaagaagacagcagcattgcaaagtgcaacgcctgtggaaagggtgaagctacaggaagctctctcccagcttgatttccaatgggaaaaagttaacaaaatgtacaaggaccgacaagggcgatttgacagatctgttgagaaatggcggcgttttcattatgatataaagatatttaatcagtggctaacagaagctgaacagtttctcagaaagacacaaattcctgagaattgggaacatgctaaatacaaatggtatcttaaggaactccaggatggcattgggcagcggcaaactgttgtcagaacattgaatgcaactggggaagaaataattcagcaatcctcaaaaacagatgccagtattctacaggaaaaattgggaagcctgaatctgcggtggcaggaggtctgcaaacagctgtcagacagaaaaaagaggctagaagaacaaaagaatatcttgtcagaatttcaaagagatttaaatgaatttgttttatggttggaggaagcagataacattgctagtatcccacttgaacctggaaaagagcagcaactaaaagaaaagcttgagcaagtcaagttactggtggaagagttgcccctgcgccagggaattctcaaacaattaaatgaaactggaggacccgtgcttgtaagtgctcccataagcccagaagagcaagataaacttgaaaataagctcaagcagacaaatctccagtggataaaggtttccagagctttacctgagaaacaaggagaaattgaagctcaaataaaagaccttgggcagcttgaaaaaaagcttgaagaccttgaagagcagttaaatcatctgctgctgtggttatctcctattaggaatcagttggaaatttataaccaaccaaaccaagaaggaccatttgacgttaaggaaactgaaatagcagttcaagctaaacaaccggatgtggaagagattttgtctaaagggcagcatttgtacaaggaaaaaccagccactcagccagtgaagaggaagttagaagatctgagctctgagtggaaggcggtaaaccgtttacttcaagagctgagggcaaagcagcctgacctagctcctggactgaccactattggagcctctcctactcagactgttactctggtgacacaacctgtggttactaaggaaactgccatctccaaactagaaatgccatcttccttgatgttggaggtacctgctctggcagatttcaaccgggcttggacagaacttaccgactggctttctctgcttgatcaagttataaaatcacagagggtgatggtgggtgaccttgaggatatcaacgagatgatcatcaagcagaaggcaacaatgcaggatttggaacagaggcgtccccagttggaagaactcattaccgctgcccaaaatttgaaaaacaagaccagcaatcaagaggctagaacaatcattacggatcgaattgaaagaattcagaatcagtgggatgaagtacaagaacaccttcagaaccggaggcaacagttgaatgaaatgttaaaggattcaacacaatggctggaagctaaggaagaagctgagcaggtcttaggacaggccagagccaagcttgagtcatggaaggagggtccctatacagtagatgcaatccaaaagaaaatcacagaaaccaagcagttggccaaagacctccgccagtggcagacaaatgtagatgtggcaaatgacttggccctgaaacttctccgggattattctgcagatgataccagaaaagtccacatgataacagagaatatcaatgcctcttggagaagcattcataaaagggtgagtgagcgagaggctgctttggaagaaactcatagattactgcaacagttccccctggacctggaaaagtttcttgcctggcttacagaagctgaaacaactgccaatgtcctacaggatgctacccgtaaggaaaggctcctagaagactccaagggagtaaaagagctgatgaaacaatggcaagacctccaaggtgaaattgaagctcacacagatgtttatcacaacctggatgaaaacagccaaaaaatcctgagatccctggaaggttccgatgatgcagtcctgttacaaagacgtttggataacatgaacttcaagtggagtgaacttcggaaaaagtctctcaacattaggtcccatttggaagccagttctgaccagtggaagcgtctgcacctttctctgcaggaacttctggtgtggctacagctgaaagatgatgaattaagccggcaggcacctattggaggcgactttccagcagttcagaagcagaacgatgtacatagggccttcaagagggaattgaaaactaaagaacctgtaatcatgagtactcttgagactgtacgaatatttctgacagagcagcctttggaaggactagagaaactctaccaggagcccagagagctgcctcctgaggagagagcccagaatgtcactcggcttctacgaaagcaggctgaggaggtcaatactgagtgggaaaaattgaacctgcactccgctgactggcagagaaaaatagatgagacccttgaaagactccgggaacttcaagaggccacggatgagctggacctcaagctgcgccaagctgaggtgatcaagggatcctggcagcccgtgggcgatctcctcattgactctctccaagatcacctcgagaaagtcaaggcacttcgaggagaaattgcgcctctgaaagagaacgtgagccacgtcaatgaccttgctcgccagcttaccactttgggcattcagctctcaccgtataacctcagcactctggaagacctgaacaccagatggaagcttctgcaggtggccgtcgaggaccgagtcaggcagctgcatgaagcccacagggactttggtccagcatctcagcactttctttccacgtctgtccagggtccctgggagagagccatctcgccaaacaaagtgccctactatatcaaccacgagactcaaacaacttgctgggaccatcccaaaatgacagagctctaccagtctttagctgacctgaataatgtcagattctcagcttataggactgccatgaaactccgaagactgcagaaggccctttgcttggatctcttgagcctgtcagctgcatgtgatgccttggaccagcacaacctcaagcaaaatgaccagcccatggatatcctgcagattattaattgtttgaccactatttatgaccgcctggagcaagagcacaacaatttggtcaacgtccctctctgcgtggatatgtgtctgaactggctgctgaatgtttatgatacgggacgaacagggaggatccgtgtcctgtcttttaaaactggcatcatttccctgtgtaaagcacatttggaagacaagtacagataccttttcaagcaagtggcaagttcaacaggattttgtgaccagcgcaggctgggcctccttctgcatgattctatccaaattccaagacagttgggtgaagttgcatcctttgggggcagtaacattgagccaagtgtccggagctgcttccaatttgctaataataagccagagatcgaagcggccctcttcctagactggatgagactggaaccccagtccatggtgtggctgcccgtcctgcacagagtggctgctgcagaaactgccaagcatcaggccaaatgtaacatctgcaaagagtgtccaatcattggattcaggtacaggagtctaaagcactttaattatgacatctgccaaagctgctttttttctggtcgagttgcaaaaggccataaaatgcactatcccatggtggaatattgcactccgactacatcaggagaagatgttcgagactttgccaaggtactaaaaaacaaatttcgaaccaaaaggtattttgcgaagcatccccgaatgggctacctgccagtgcagactgtcttagagggggacaacatggaaacgcctgcctcgtcccctcagctttcacacgatgatactcattcacgcattgaacattatgctagcaggctagcagaaatggaaaacagcaatggatcttatctaaatgatagcatctctcctaatgagagcatagatgatgaacatttgttaatccagcattactgccaaagtttgaaccaggactcccccctgagccagcctcgtagtcctgcccagatcttgatttccttagagagtgaggaaagaggggagctagagagaatcctagcagatcttgaggaagaaaacaggaatctgcaagcagaatatgaccgtctaaagcagcagcacgaacataaaggcctgtccccactgccgtcccctcctgaaatgatgcccacctctccccagagtccccgggatgctgagctcattgctgaggccaagctactgcgtcaacacaaaggccgcctggaagccaggatgcaaatcctggaagaccacaataaacagctggagtcacagttacacaggctaaggcagctgctggagcaaccccaggcagaggccaaagtgaatggcacaacggtgtcctctccttctacctctctacagaggtccgacagcagtcagcctatgctgctccgagtggttggcagtcaaacttcggactccatgggtgaggaagatcttctcagtcctccccaggacacaagcacagggttagaggaggtgatggagcaactcaacaactccttccctagttcaagaggaagaaatacccctggaaagccaatgagagaggacacaatgtaggaagtcttttccacatggcagatgatttgggcagagcgatggagtccttagtatcagtcatgacagatgaagaaggagcagaataaatgttttacaactcctgattcccgcatggtttttataatattcatacaacaaagaggattagacagtaagagtttacaagaaataaatctatatttttgtgaagggtagtggtattatactgtagatttcagtagtttctaagtctgttattgttttgttaacaatggcaggttttacacgtctatgcaattgtacaaaaaagttataagaaaactacatgtaaaatcttgatagctaaataacttgccatttctttatatggaacgcattttgggttgtttaaaaatttataacagttataaagaaagattgtaaactaaagtgtgctttataaaaaaaagttgtttataaaaacccctaaaaacaaaacaaacacacacacacacacatacacacacacacacaaaactttgaggcagcgcattgttttgcatccttttggcgtgatatccatatgaaattcatggctttttctttttttgcatattaaagataagacttcctctaccaccacaccaaatgactactacacactgctcatttgagaactgtcagctgagtggggcaggcttgagttttcatttcatatatctatatgtctataagtatataaatactatagttatatagataaagagatacgaatttctatagactgactttttccattttttaaatgttcatgtcacatcctaatagaaagaaattacttctagtcagtcatccaggcttacctgcttggtctagaatggatttttcccggagccggaagccaggaggaaactacaccacactaaaacattgtctacagctccagatgtttctcattttaaacaactttccactgacaacgaaagtaaagtaaagtattggatttttttaaagggaacatgtgaatgaatacacaggacttattatatcagagtgagtaatcggttggttggttgattgattgattgattgatacattcagcttcctgctgctagcaatgccacgatttagatttaatgatgcttcagtggaaatcaatcagaaggtattctgaccttgtgaacatcagaaggtattttttaactcccaagcagtagcaggacgatgatagggctggagggctatggattcccagcccatccctgtgaaggagtaggccactctttaagtgaaggattggatgattgttcataatacataaagttctctgtaattacaactaaattattatgccctcttctcacagtcaaaaggaactgggtggtttggtttttgttgcttttttagatttattgtcccatgtgggatgagtttttaaatgccacaagacataatttaaaataaataaactttgggaaaaggtgtaaaacagtagccccatcacatttgtgatactgacaggtatcaacccagaagcccatgaactgtgtttccatcctttgcatttctctgcgagtagttccacacaggtttgtaagtaagtaagaaagaaggcaaattgattcaaatgttacaaaaaaacccttcttggtggattagacaggttaaatatataaacaaacaaacaaaaattgctcaaaaaagaggagaaaagctcaagaggaaaagctaaggactggtaggaaaaagctttactctttcatgccattttatttctttttgatttttaaatcattcattcaatagataccaccgtgtgacctataattttgcaaatctgttacctctgacatcaagtgtaattagcttttggagagtgggctgacatcaagtgtaattagcttttggagagtgggttttgtccattattaataattaattaattaacatcaaacacggcttctcatgctatttctacctcactttggttttggggtgttcctgataattgtgcacacctgagttcacagcttcaccacttgtccattgcgttattttctttttcctttataattctttctttttccttcataattttcaaaagaaaacccaaagctctaaggtaacaaattaccaaattacatgaagatttggtttttgtcttgcatttttttcctttatgtgacgctggaccttttctttacccaaggatttttaaaactcagatttaaaacaaggggttactttacatcctactaagaagtttaagtaagtaagtttcattctaaaatcagaggtaaatagagtgcataaataattttgttttaatctttttgtttttcttttagacacattagctctggagtgagtctgtcataatatttgaacaaaaattgagagctttattgctgcattttaagcataattaatttggacattatttcgtgttgtgttctttataaccaccaagtattaaactgtaaatcataatgtaactgaagcataaacatcacatggcatgttttgtcattgttttcaggtactgagttcttacttgagtatcataatatattgtgttttaacaccaacactgtaacatttacgaattatttttttaaacttcagttttactgcattttcacaacatatcagacttcaccaaatatatgccttactattgtattatagtactgctttactgtgtatctcaataaagcacgcagttatgttacaaaaaagta

SEQ ID NO: 47 - protein, 3672 aa, Homo sapiens
MLWWEEVEDCYEREDVQKKTFTKWVNAQFSKFGKQHIENLFSDLQDGRRLLDLLEGLTGQKLPKEKGSTRVHALNNVNKALRVLQNNNVDLVNIGSTDIVDGNHKLTLGLIWNIILHWQVKNVMKNIMAGLQQTNSEKILLSWVRQSTRNYPQVNVINFTTSWSDGLALNALIHSHRPDLFDWNSVVCQQSATQRLEHAFNIARYQLGIEKLLDPEDVDTTYPDKKSILMYITSLFQVLPQQVSIEAIQEVEMLPRPPKVTKEEHFQLHHQMHYSQQITVSLAQGYERTSSPKPRFKSYAYTQAAYVTTSDPTRSPFPSQHLEAPEDKSFGSSLMESEVNLDRYQTALEEVLSWLLSAEDTLQAQGEISNDVEVVKDQFHTHEGYMMDLTAHQGRVGNILQLGSKLIGTGKLSEDEETEVQEQMNLLNSRWECLRVASMEKQSNLHRVLMDLQNQKLKELNDWLTKTEERTRKMEEEPLGPDLEDLKRQVQQHKVLQEDLEQEQVRVNSLTHMVVVVDESSGDHATAALEEQLKVLGDRWANICRWTEDRWVLLQDILLKWQRLTEEQCLFSAWLSEKEDAVNKIHTTGFKDQNEMLSSLQKLAVLKADLEKKKQSMGKLYSLKQDLLSTLKNKSVTQKTEAWLDNFARCWDNLVQKLEKSTAQISQAVTTTQPSLTQTTVMETVTTVTTREQILVKHAQEELPPPPPQKKRQITVDSEIRKRLDVDITELHSWITRSEAVLQSPEFAIFRKEGNFSDLKEKVNAIEREKAEKFRKLQDASRSAQALVEQMVNEGVNADSIKQASEQLNSRWIEFCQLLSERLNWLEYQNNIIAFYNQLQQLEQMTTTAENWLKIQPTTPSEPTAIKSQLKICKDEVNRLSDLQPQIERLKIQSIALKEKGQGPMFLDADFVAFTNHFKQVFSDVQAREKELQTIFDTLPPMRYQETMSAIRTWVQQSETKLSIPQLSVTDYEIMEQRLGELQALQSSLQEQQSGLYYLSTTVKEMSKKAPSEISRKYQSEFEEIEGRWKKLSSQLVEHCQKLEEQMNKLRKIQNHIQTLKKWMAEVDVFLKEEWPALGDSEILKKQLKQCRLLVSDIQTIQPSLNSVNEGGQKIKNEAEPEFASRLETELKELNTQWDHMCQQVYARKEALKGGLEKTVSLQKDLSEMHEWMTQAEEEYLERDFEYKTPDELQKAVEEMKRAKEEAQQKEAKVKLLTESVNSVIAQAPPVAQEALKKELETLTTNYQWLCTRLNGKCKTLEEVWACWHELLSYLEKANKWLNEVEFKLKTTENIPGGAEEISEVLDSLENLMRHSEDNPNQIRILAQTLTDGGVMDELINEELETFNSRWRELHEEAVRRQKLLEQSIQSAQETEKSLHLIQESLTFIDKQLAAYIADKVDAAQMPQEAQKIQSDLTSHEISLEEMKKHNQGKEAAQRVLSQIDVAQKKLQDVSMKFRLFQKPANFEQRLQESKMILDEVKMHLPALETKSVEQEVVQSQLNHCVNLYKSLSEVKSEVEMVIKTGRQIVQKKQTENPKELDERVTALKLHYNELGAKVTERKQQLEKCLKLSRKMRKEMNVLTEWLAATDMELTKRSAVEGMPSNLDSEVAWGKATQKEIEKQKVHLKSITEVGEALKTVLGKKETLVEDKLSLLNSNWIAVTSRAEEWLNLLLEYQKHMETFDQNVDHITKWIIQADTLLDESEKKKPQQKEDVLKRLKAELNDIRPKVDSTRDQAANLMANRGDHCRKLVEPQISELNHRFAAISHRIKTGKASIPLKELEQFNSDIQKLLEPLEAEIQQGVNLKEEDFNKDMNEDNEGTVKELLQRGDNLQQRITDERKREEIKIKQQLLQTKHNALKDLRSQRRKKALEISHQWYQYKRQADDLLKCLDDIEKKLASLPEPRDERKIKEIDRELQKKKEELNAVRRQAEGLSEDGAAMAVEPTQIQLSKRWREIESKFAQFRRLNFAQIHTVREETMMVMTEDMPLEISYVPSTYLTEITHVSQALLEVEQLLNAPDLCAKDFEDLFKQEESLKNIKDSLQQSSGRIDIIHSKKTAALQSATPVERVKLQEALSQLDFQWEKVNKMYKDRQGRFDRSVEKWRRFHYDIKIFNQWLTEAEQFLRKTQIPENWEHAKYKWYLKELQDGIGQRQTVVRTLNATGEEIIQQSSKTDASILQEKLGSLNLRWQEVCKQLSDRKKRLEEQKNILSEFQRDLNEFVLWLEEADNIASIPLEPGKEQQLKEKLEQVKLLVEELPLRQGILKQLNETGGPVLVSAPISPEEQDKLENKLKQTNLQWIKVSRALPEKQGEIEAQIKDLGQLEKKLEDLEEQLNHLLLWLSPIRNQLEIYNQPNQEGPFDVKETEIAVQAKQPDVEEILSKGQHLYKEKPATQPVKRKLEDLSSEWKAVNRLLQELRAKQPDLAPGLTTIGASPTQTVTLVTQPVVTKETAISKLEMPSSLMLEVPALADFNRAWTELTDWLSLLDQVIKSQRVMVGDLEDINEMIIKQKATMQDLEQRRPQLEELITAAQNLKNKTSNQEARTIITDRIERIQNQWDEVQEHLQNRRQQLNEMLKDSTQWLEAKEEAEQVLGQARAKLESWKEGPYTVDAIQKKITETKQLAKDLRQWQTNVDVANDLALKLLRDYSADDTRKVHMITENINASWRSIHKRVSEREAALEETHRLLQQFPLDLEKFLAWLTEAETTANVLQDATRKERLLEDSKGVKELMKQWQDLQGEIEAHTDVYHNLDENSQKILRSLEGSDDAVLLQRRLDNMNFKWSELRKKSLNIRSHLEASSDQWKRLHLSLQELLVWLQLKDDELSRQAPIGGDFPAVQKQNDVHRAFKRELKTKEPVIMSTLETVRIFLTEQPLEGLEKLYQEPRELPPEERAQNVTRLLRKQAEEVNTEWEKLNLHSADWQRKIDETLERLRELQEATDELDLKLRQAEVIKGSWQPVGDLLIDSLQDHLEKVKALRGEIAPLKENVSHVNDLARQLTTLGIQLSPYNLSTLEDLNTRWKLLQVAVEDRVRQLHEAHRDFGPASQHFLSTSVQGPWERAISPNKVPYYINHETQTTCWDHPKMTELYQSLADLNNVRFSAYRTAMKLRRLQKALCLDLLSLSAACDALDQHNLKQNDQPMDILQIINCLTTIYDRLEQEHNNLVNVPLCVDMCLNWLLNVYDTGRTGRIRVLSFKTGIISLCKAHLEDKYRYLFKQVASSTGFCDQRRLGLLLHDSIQIPRQLGEVASFGGSNIEPSVRSCFQFANNKPEIEAALFLDWMRLEPQSMVWLPVLHRVAAAETAKHQAKCNICKECPIIGFRYRSLKHFNYDICQSCFFSGRVAKGHKMHYPMVEYCTPTTSGEDVRDFAKVLKNKFRTKRYFAKHPRMGYLPVQTVLEGDNMETPASSPQLSHDDTHSRIEHYASRLAEMENSNGSYLNDSISPNESIDDEHLLIQHYCQSLNQDSPLSQPRSPAQILISLESEERGELERILADLEEENRNLQAEYDRLKQQHEHKGLSPLPSPPEMMPTSPQSPRDAELIAEAKLLRQHKGRLEARMQILEDHNKQLESQLHRLRQLLEQPQAEAKVNGTTVSSPSTSLQRSDSSQPMLLRVVGSQTSDSMGEEDLLSPPQDTSTGLEEVMEQLNNSFPSSRGRNTPGKPMREDTM

SEQ ID NO: 48 - DNA, 13923 bp, Homo sapiens
actttccccctacaggactcagatctgggaggcaattaccttcggagaaaaacgaataggaaaaactgaagtgttactttttttaaagctgctgaagtttgttggtttctcattgtttttaagcctactggagcaataaagtttgaagaacttttaccaggttttttttatcgctgccttgatatacacttttcaaaatgctttggtgggaagaagtagaggactgttatgaaagagaagatgttcaaaagaaaacattcacaaaatgggtaaatgcacaattttctaagtttgggaagcagcatattgagaacctcttcagtgacctacaggatgggaggcgcctcctagacctcctcgaaggcctgacagggcaaaaactgccaaaagaaaaaggatccacaagagttcatgccctgaacaatgtcaacaaggcactgcgggttttgcagaacaataatgttgatttagtgaatattggaagtactgacatcgtagatggaaatcataaactgactcttggtttgatttggaatataatcctccactggcaggtcaaaaatgtaatgaaaaatatcatggctggattgcaacaaaccaacagtgaaaagattctcctgagctgggtccgacaatcaactcgtaattatccacaggttaatgtaatcaacttcaccaccagctggtctgatggcctggctttgaatgctctcatccatagtcataggccagacctatttgactggaatagtgtggtttgccagcagtcagccacacaacgactggaacatgcattcaacatcgccagatatcaattaggcatagagaaactactcgatcctgaagatgttgataccacctatccagataagaagtccatcttaatgtacatcacatcactcttccaagttttgcctcaacaagtgagcattgaagccatccaggaagtggaaatgttgccaaggccacctaaagtgactaaagaagaacattttcagttacatcatcaaatgcactattctcaacagatcacggtcagtctagcacagggatatgagagaacttcttcccctaagcctcgattcaagagctatgcctacacacaggctgcttatgtcaccacctctgaccctacacggagcccatttccttcacagcatttggaagctcctgaagacaagtcatttggcagttcattgatggagagtgaagtaaacctggaccgttatcaaacagctttagaagaagtattatcgtggcttctttctgctgaggacacattgcaagcacaaggagagatttctaatgatgtggaagtggtgaaagaccagtttcatactcatgaggggtacatgatggatttgacagcccatcagggccgggttggtaatattctacaattgggaagtaagctgattggaacaggaaaattatcagaagatgaagaaactgaagtacaagagcagatgaatctcctaaattcaagatgggaatgcctcagggtagctagcatggaaaaacaaagcaatttacatagagttttaatggatctccagaatcagaaactgaaagagttgaatgactggctaacaaaaacagaagaaagaacaaggaaaatggaggaagagcctcttggacctgatcttgaagacctaaaacgccaagtacaacaacataaggtgcttcaagaagatctagaacaagaacaagtcagggtcaattctctcactcacatggtggtggtagttgatgaatctagtggagatcacgcaactgctgctttggaagaacaacttaaggtattgggagatcgatgggcaaacatctgtagatggacagaagaccgctgggttcttttacaagacatccttctcaaatggcaacgtcttactgaagaacagtgcctttttagtgcatggctttcagaaaaagaagatgcagtgaacaagattcacacaactggctttaaagatcaaaatgaaatgttatcaagtcttcaaaaactggccgttttaaaagcggatctagaaaagaaaaagcaatccatgggcaaactgtattcactcaaacaagatcttctttcaacactgaagaataagtcagtgacccagaagacggaagcatggctggataactttgcccggtgttgggataatttagtccaaaaacttgaaaagagtacagcacagatttcacaggctgtcaccaccactcagccatcactaacacagacaactgtaatggaaacagtaactacggtgaccacaagggaacagatcctggtaaagcatgctcaagaggaacttccaccaccacctccccaaaagaagaggcagattactgtggattctgaaattaggaaaaggttggatgttgatataactgaacttcacagctggattactcgctcagaagctgtgttgcagagtcctgaatttgcaatctttcggaaggaaggcaacttctcagacttaaaagaaaaagtcaatgccatagagcgagaaaaagctgagaagttcagaaaactgcaagatgccagcagatcagctcaggccctggtggaacagatggtgaatgagggtgttaatgcagatagcatcaaacaagcctcagaacaactgaacagccggtggatcgaattctgccagttgctaagtgagagacttaactggctggagtatcagaacaacatcatcgctttctataatcagctacaacaattggagcagatgacaactactgctgaaaactggttgaaaatccaacccaccaccccatcagagccaacagcaattaaaagtcagttaaaaatttgtaaggatgaagtcaaccggctatcagatcttcaacctcaaattgaacgattaaaaattcaaagcatagccctgaaagagaaaggacaaggacccatgttcctggatgcagactttgtggcctttacaaatcattttaagcaagtcttttctgatgtgcaggccagagagaaagagctacagacaatttttgacactttgccaccaatgcgctatcaggagaccatgagtgccatcaggacatgggtccagcagtcagaaaccaaactctccatacctcaacttagtgtcaccgactatgaaatcatggagcagagactcggggaattgcaggctttacaaagttctctgcaagagcaacaaagtggcctatactatctcagcaccactgtgaaagagatgtcgaagaaagcgccctctgaaattagccggaaatatcaatcagaatttgaagaaattgagggacgctggaagaagctctcctcccagctggttgagcattgtcaaaagctagaggagcaaatgaataaactccgaaaaattcagaatcacatacaaaccctgaagaaatggatggctgaagttgatgtttttctgaaggaggaatggcctgcccttggggattcagaaattctaaaaaagcagctgaaacagtgcagacttttagtcagtgatattcagacaattcagcccagtctaaacagtgtcaatgaaggtgggcagaagataaagaatgaagcagagccagagtttgcttcgagacttgagacagaactcaaagaacttaacactcagtgggatcacatgtgccaacaggtctatgccagaaaggaggccttgaagggaggtttggagaaaactgtaagcctccagaaagatctatcagagatgcacgaatggatgacacaagctgaagaagagtatcttgagagagattttgaatataaaactccagatgaattacagaaagcagttgaagagatgaagagagctaaagaagaggcccaacaaaaagaagcgaaagtgaaactccttactgagtctgtaaatagtgtcatagctcaagctccacctgtagcacaagaggccttaaaaaaggaacttgaaactctaaccaccaactaccagtggctctgcactaggctgaatgggaaatgcaagactttggaagaagtttgggcatgttggcatgagttattgtcatacttggagaaagcaaacaagtggctaaatgaagtagaatttaaacttaaaaccactgaaaacattcctggcggagctgaggaaatctctgaggtgctagattcacttgaaaatttgatgcgacattcagaggataacccaaatcagattcgcatattggcacagaccctaacagatggcggagtcatggatgagctaatcaatgaggaacttgagacatttaattctcgttggagggaactacatgaagaggctgtaaggaggcaaaagttgcttgaacagagcatccagtctgcccaggagactgaaaaatccttacacttaatccaggagtccctcacattcattgacaagcagttggcagcttatattgcagacaaggtggacgcagctcaaatgcctcaggaagcccagaaaatccaatctgatttgacaagtcatgagatcagtttagaagaaatgaagaaacataatcaggggaaggaggctgcccaaagagtcctgtctcagattgatgttgcacagaaaaaattacaagatgtctccatgaagtttcgattattccagaaaccagccaattttgagcagcgtctacaagaaagtaagatgattttagatgaagtgaagatgcacttgcctgcattggaaacaaagagtgtggaacaggaagtagtacagtcacagctaaatcattgtgtgaacttgtataaaagtctgagtgaagtgaagtctgaagtggaaatggtgataaagactggacgtcagattgtacagaaaaagcagacggaaaatcccaaagaacttgatgaaagagtaacagctttgaaattgcattataatgagctgggagcaaaggtaacagaaagaaagcaacagttggagaaatgcttgaaattgtcccgtaagatgcgaaaggaaatgaatgtcttgacagaatggctggcagctacagatatggaattgacaaagagatcagcagttgaaggaatgcctagtaatttggattctgaagttgcctggggaaaggctactcaaaaagagattgagaaacagaaggtgcacctgaagagtatcacagaggtaggagaggccttgaaaacagttttgggcaagaaggagacgttggtggaagataaactcagtcttctgaatagtaactggatagctgtcacctcccgagcagaagagtggttaaatcttttgttggaataccagaaacacatggaaacttttgaccagaatgtggaccacatcacaaagtggatcattcaggctgacacacttttggatgaatcagagaaaaagaaaccccagcaaaaagaagacgtgcttaagcgtttaaaggcagaactgaatgacatacgcccaaaggtggactctacacgtgaccaagcagcaaacttgatggcaaaccgcggtgaccactgcaggaaattagtagagccccaaatctcagagctcaaccatcgatttgcagccatttcacacagaattaagactggaaaggcctccattcctttgaaggaattggagcagtttaactcagatatacaaaaattgcttgaaccactggaggctgaaattcagcagggggtgaatctgaaagaggaagacttcaataaagatatgaatgaagacaatgagggtactgtaaaagaattgttgcaaagaggagacaacttacaacaaagaatcacagatgagagaaagcgagaggaaataaagataaaacagcagctgttacagacaaaacataatgctctcaaggatttgaggtctcaaagaagaaaaaaggctctagaaatttctcatcagtggtatcagtacaagaggcaggctgatgatctcctgaaatgcttggatgacattgaaaaaaaattagccagcctacctgagcccagagatgaaaggaaaataaaggaaattgatcgggaattgcagaagaagaaagaggagctgaatgcagtgcgtaggcaagctgagggcttgtctgaggatggggccgcaatggcagtggagccaactcagatccagctcagcaagcgctggcgggaaattgagagcaaatttgctcagtttcgaagactcaactttgcacaaattcacactgtccgtgaagaaacgatgatggtgatgactgaagacatgcctttggaaatttcttatgtgccttctacttatttgactgaaatcactcatgtctcacaagccctattagaagtggaacaacttctcaatgctcctgacctctgtgctaaggactttgaagatctctttaagcaagaggagtctctgaagaatataaaagatagtctacaacaaagctcaggtcggattgacattattcatagcaagaagacagcagcattgcaaagtgcaacgcctgtggaaagggtgaagctacaggaagctctctcccagcttgatttccaatgggaaaaagttaacaaaatgtacaaggaccgacaagggcgatttgacagatctgttgagaaatggcggcgttttcattatgatataaagatatttaatcagtggctaacagaagctgaacagtttctcagaaagacacaaattcctgagaattgggaacatgctaaatacaaatggtatcttaaggaactccaggatggcattgggcagcggcaaactgttgtcagaacattgaatgcaactggggaagaaataattcagcaatcctcaaaaacagatgccagtattctacaggaaaaattgggaagcctgaatctgcggtggcaggaggtctgcaaacagctgtcagacagaaaaaagaggctagaagaacaaaagaatatcttgtcagaatttcaaagagatttaaatgaatttgttttatggttggaggaagcagataacattgctagtatcccacttgaacctggaaaagagcagcaactaaaagaaaagcttgagcaagtcaagttactggtggaagagttgcccctgcgccagggaattctcaaacaattaaatgaaactggaggacccgtgcttgtaagtgctcccataagcccagaagagcaagataaacttgaaaataagctcaagcagacaaatctccagtggataaaggtttccagagctttacctgagaaacaaggagaaattgaagctcaaataaaagaccttgggcagcttgaaaaaaagcttgaagaccttgaagagcagttaaatcatctgctgctgtggttatctcctattaggaatcagttggaaatttataaccaaccaaaccaagaaggaccatttgacgttaaggaaactgaaatagcagttcaagctaaacaaccggatgtggaagagattttgtctaaagggcagcatttgtacaaggaaaaaccagccactcagccagtgaagaggaagttagaagatctgagctctgagtggaaggcggtaaaccgtttacttcaagagctgagggcaaagcagcctgacctagctcctggactgaccactattggagcctctcctactcagactgttactctggtgacacaacctgtggttactaaggaaactgccatctccaaactagaaatgccatcttccttgatgttggaggtacctgctctggcagatttcaaccgggcttggacagaacttaccgactggctttctctgcttgatcaagttataaaatcacagagggtgatggtgggtgaccttgaggatatcaacgagatgatcatcaagcagaaggcaacaatgcaggatttggaacagaggcgtccccagttggaagaactcattaccgctgcccaaaatttgaaaaacaagaccagcaatcaagaggctagaacaatcattacggatcgaattgaaagaattcagaatcagtgggatgaagtacaagaacaccttcagaaccggaggcaacagttgaatgaaatgttaaaggattcaacacaatggctggaagctaaggaagaagctgagcaggtcttaggacaggccagagccaagcttgagtcatggaaggagggtccctatacagtagatgcaatccaaaagaaaatcacagaaaccaagcagttggccaaagacctccgccagtggcagacaaatgtagatgtggcaaatgacttggccctgaaacttctccgggattattctgcagatgataccagaaaagtccacatgataacagagaatatcaatgcctcttggagaagcattcataaaagggtgagtgagcgagaggctgctttggaagaaactcatagattactgcaacagttccccctggacctggaaaagtttcttgcctggcttacagaagctgaaacaactgccaatgtcctacaggatgctacccgtaaggaaaggctcctagaagactccaagggagtaaaagagctgatgaaacaatggcaagacctccaaggtgaaattgaagctcacacagatgtttatcacaacctggatgaaaacagccaaaaaatcctgagatccctggaaggttccgatgatgcagtcctgttacaaagacgtttggataacatgaacttcaagtggagtgaacttcggaaaaagtctctcaacattaggtcccatttggaagccagttctgaccagtggaagcgtctgcacctttctctgcaggaacttctggtgtggctacagctgaaagatgatgaattaagccggcaggcacctattggaggcgactttccagcagttcagaagcagaacgatgtacatagggccttcaagagggaattgaaaactaaagaacctgtaatcatgagtactcttgagactgtacgaatatttctgacagagcagcctttggaaggactagagaaactctaccaggagcccagagagctgcctcctgaggagagagcccagaatgtcactcggcttctacgaaagcaggctgaggaggtcaatactgagtgggaaaaattgaacctgcactccgctgactggcagagaaaaatagatgagacccttgaaagactccgggaacttcaagaggccacggatgagctggacctcaagctgcgccaagctgaggtgatcaagggatcctggcagcccgtgggcgatctcctcattgactctctccaagatcacctcgagaaagtcaaggcacttcgaggagaaattgcgcctctgaaagagaacgtgagccacgtcaatgaccttgctcgccagcttaccactttgggcattcagctctcaccgtataacctcagcactctggaagacctgaacaccagatggaagcttctgcaggtggccgtcgaggaccgagtcaggcagctgcatgaagcccacagggactttggtccagcatctcagcactttctttccacgtctgtccagggtccctgggagagagccatctcgccaaacaaagtgccctactatatcaaccacgagactcaaacaacttgctgggaccatcccaaaatgacagagctctaccagtctttagctgacctgaataatgtcagattctcagcttataggactgccatgaaactccgaagactgcagaaggccctttgcttggatctcttgagcctgtcagctgcatgtgatgccttggaccagcacaacctcaagcaaaatgaccagcccatggatatcctgcagattattaattgtttgaccactatttatgaccgcctggagcaagagcacaacaatttggtcaacgtccctctctgcgtggatatgtgtctgaactggctgctgaatgtttatgatacgggacgaacagggaggatccgtgtcctgtcttttaaaactggcatcatttccctgtgtaaagcacatttggaagacaagtacagataccttttcaagcaagtggcaagttcaacaggattttgtgaccagcgcaggctgggcctccttctgcatgattctatccaaattccaagacagttgggtgaagttgcatcctttgggggcagtaacattgagccaagtgtccggagctgcttccaatttgctaataataagccagagatcgaagcggccctcttcctagactggatgagactggaaccccagtccatggtgtggctgcccgtcctgcacagagtggctgctgcagaaactgccaagcatcaggccaaatgtaacatctgcaaagagtgtccaatcattggattcaggtacaggagtctaaagcactttaattatgacatctgccaaagctgctttttttctggtcgagttgcaaaaggccataaaatgcactatcccatggtggaatattgcactccgactacatcaggagaagatgttcgagactttgccaaggtactaaaaaacaaatttcgaaccaaaaggtattttgcgaagcatccccgaatgggctacctgccagtgcagactgtcttagagggggacaacatggaaactcccgttactctgatcaacttctggccagtagattctgcgcctgcctcgtcccctcagctttcacacgatgatactcattcacgcattgaacattatgctagcaggctagcagaaatggaaaacagcaatggatcttatctaaatgatagcatctctcctaatgagagcatagatgatgaacatttgttaatccagcattactgccaaagtttgaaccaggactcccccctgagccagcctcgtagtcctgcccagatcttgatttccttagagagtgaggaaagaggggagctagagagaatcctagcagatcttgaggaagaaaacaggaatctgcaagcagaatatgaccgtctaaagcagcagcacgaacataaaggcctgtccccactgccgtcccctcctgaaatgatgcccacctctccccagagtccccgggatgctgagctcattgctgaggccaagctactgcgtcaacacaaaggccgcctggaagccaggatgcaaatcctggaagaccacaataaacagctggagtcacagttacacaggctaaggcagctgctggagcaaccccaggcagaggccaaagtgaatggcacaacggtgtcctctccttctacctctctacagaggtccgacagcagtcagcctatgctgctccgagtggttggcagtcaaacttcggactccatgggtgaggaagatcttctcagtcctccccaggacacaagcacagggttagaggaggtgatggagcaactcaacaactccttccctagttcaagaggacacaatgtaggaagtcttttccacatggcagatgatttgggcagagcgatggagtccttagtatcagtcatgacagatgaagaaggagcagaataaatgttttacaactcctgattcccgcatggtttttataatattcatacaacaaagaggattagacagtaagagtttacaagaaataaatctatatttttgtgaagggtagtggtattatactgtagatttcagtagtttctaagtctgttattgttttgttaacaatggcaggttttacacgtctatgcaattgtacaaaaaagttataagaaaactacatgtaaaatcttgatagctaaataacttgccatttctttatatggaacgcattttgggttgtttaaaaatttataacagttataaagaaagattgtaaactaaagtgtgctttataaaaaaaagttgtttataaaaacccctaaaaacaaaacaaacacacacacacacacatacacacacacacacaaaactttgaggcagcgcattgttttgcatccttttggcgtgatatccatatgaaattcatggctttttctttttttgcatattaaagataagacttcctctaccaccacaccaaatgactactacacactgctcatttgagaactgtcagctgagtggggcaggcttgagttttcatttcatatatctatatgtctataagtatataaatactatagttatatagataaagagatacgaatttctatagactgactttttccattttttaaatgttcatgtcacatcctaatagaaagaaattacttctagtcagtcatccaggcttacctgcttggtctagaatggatttttcccggagccggaagccaggaggaaactacaccacactaaaacattgtctacagctccagatgtttctcattttaaacaactttccactgacaacgaaagtaaagtaaagtattggatttttttaaagggaacatgtgaatgaatacacaggacttattatatcagagtgagtaatcggttggttggttgattgattgattgattgatacattcagcttcctgctgctagcaatgccacgatttagatttaatgatgcttcagtggaaatcaatcagaaggtattctgaccttgtgaacatcagaaggtattttttaactcccaagcagtagcaggacgatgatagggctggagggctatggattcccagcccatccctgtgaaggagtaggccactctttaagtgaaggattggatgattgttcataatacataaagttctctgtaattacaactaaattattatgccctcttctcacagtcaaaaggaactgggtggtttggtttttgttgcttttttagatttattgtcccatgtgggatgagtttttaaatgccacaagacataatttaaaataaataaactttgggaaaaggtgtaaaacagtagccccatcacatttgtgatactgacaggtatcaacccagaagcccatgaactgtgtttccatcctttgcatttctctgcgagtagttccacacaggtttgtaagtaagtaagaaagaaggcaaattgattcaaatgttacaaaaaaacccttcttggtggattagacaggttaaatatataaacaaacaaacaaaaattgctcaaaaaagaggagaaaagctcaagaggaaaagctaaggactggtaggaaaaagctttactctttcatgccattttatttctttttgatttttaaatcattcattcaatagataccaccgtgtgacctataattttgcaaatctgttacctctgacatcaagtgtaattagcttttggagagtgggctgacatcaagtgtaattagcttttggagagtgggttttgtccattattaataattaattaattaacatcaaacacggcttctcatgctatttctacctcactttggttttggggtgttcctgataattgtgcacacctgagttcacagcttcaccacttgtccattgcgttattttctttttcctttataattctttctttttccttcataattttcaaaagaaaacccaaagctctaaggtaacaaattaccaaattacatgaagatttggtttttgtcttgcatttttttcctttatgtgacgctggaccttttctttacccaaggatttttaaaactcagatttaaaacaaggggttactttacatcctactaagaagtttaagtaagtaagtttcattctaaaatcagaggtaaatagagtgcataaataattttgttttaatctttttgtttttcttttagacacattagctctggagtgagtctgtcataatatttgaacaaaaattgagagctttattgctgcattttaagcataattaatttggacattatttcgtgttgtgttctttataaccaccaagtattaaactgtaaatcataatgtaactgaagcataaacatcacatggcatgttttgtcattgttttcaggtactgagttcttacttgagtatcataatatattgtgttttaacaccaacactgtaacatttacgaattatttttttaaacttcagttttactgcattttcacaacatatcagacttcaccaaatatatgccttactattgtattatagtactgctttactgtgtatctcaataaagcacgcagttatgttacaaaaaagta

SEQ ID NO: 49 - protein, 3703 aa, Homo sapiens
MLWWEEVEDCYEREDVQKKTFTKWVNAQFSKFGKQHIENLFSDLQDGRRLLDLLEGLTGQKLPKEKGSTRVHALNNVNKALRVLQNNNVDLVNIGSTDIVDGNHKLTLGLIWNIILHWQVKNVMKNIMAGLQQTNSEKILLSWVRQSTRNYPQVNVINFTTSWSDGLALNALIHSHRPDLFDWNSVVCQQSATQRLEHAFNIARYQLGIEKLLDPEDVDTTYPDKKSILMYITSLFQVLPQQVSIEAIQEVEMLPRPPKVTKEEHFQLHHQMHYSQQITVSLAQGYERTSSPKPRFKSYAYTQAAYVTTSDPTRSPFPSQHLEAPEDKSFGSSLMESEVNLDRYQTALEEVLSWLLSAEDTLQAQGEISNDVEVVKDQFHTHEGYMMDLTAHQGRVGNILQLGSKLIGTGKLSEDEETEVQEQMNLLNSRWECLRVASMEKQSNLHRVLMDLQNQKLKELNDWLTKTEERTRKMEEEPLGPDLEDLKRQVQQHKVLQEDLEQEQVRVNSLTHMVVVVDESSGDHATAALEEQLKVLGDRWANICRWTEDRWVLLQDILLKWQRLTEEQCLFSAWLSEKEDAVNKIHTTGFKDQNEMLSSLQKLAVLKADLEKKKQSMGKLYSLKQDLLSTLKNKSVTQKTEAWLDNFARCWDNLVQKLEKSTAQISQAVTTTQPSLTQTTVMETVTTVTTREQILVKHAQEELPPPPPQKKRQITVDSEIRKRLDVDITELHSWITRSEAVLQSPEFAIFRKEGNFSDLKEKVNAIEREKAEKFRKLQDASRSAQALVEQMVNEGVNADSIKQASEQLNSRWIEFCQLLSERLNWLEYQNNIIAFYNQLQQLEQMTTTAENWLKIQPTTPSEPTAIKSQLKICKDEVNRLSDLQPQIERLKIQSIALKEKGQGPMFLDADFVAFTNHFKQVFSDVQAREKELQTIFDTLPPMRYQETMSAIRTWVQQSETKLSIPQLSVTDYEIMEQRLGELQALQSSLQEQQSGLYYLSTTVKEMSKKAPSEISRKYQSEFEEIEGRWKKLSSQLVEHCQKLEEQMNKLRKIQNHIQTLKKWMAEVDVFLKEEWPALGDSEILKKQLKQCRLLVSDIQTIQPSLNSVNEGGQKIKNEAEPEFASRLETELKELNTQWDHMCQQVYARKEALKGGLEKTVSLQKDLSEMHEWMTQAEEEYLERDFEYKTPDELQKAVEEMKRAKEEAQQKEAKVKLLTESVNSVIAQAPPVAQEALKKELETLTTNYQWLCTRLNGKCKTLEEVWACWHELLSYLEKANKWLNEVEFKLKTTENIPGGAEEISEVLDSLENLMRHSEDNPNQIRILAQTLTDGGVMDELINEELETFNSRWRELHEEAVRRQKLLEQSIQSAQETEKSLHLIQESLTFIDKQLAAYIADKVDAAQMPQEAQKIQSDLTSHEISLEEMKKHNQGKEAAQRVLSQIDVAQKKLQDVSMKFRLFQKPANFEQRLQESKMILDEVKMHLPALETKSVEQEVVQSQLNHCVNLYKSLSEVKSEVEMVIKTGRQIVQKKQTENPKELDERVTALKLHYNELGAKVTERKQQLEKCLKLSRKMRKEMNVLTEWLAATDMELTKRSAVEGMPSNLDSEVAWGKATQKEIEKQKVHLKSITEVGEALKTVLGKKETLVEDKLSLLNSNWIAVTSRAEEWLNLLLEYQKHMETFDQNVDHITKWIIQADTLLDESEKKKPQQKEDVLKRLKAELNDIRPKVDSTRDQAANLMANRGDHCRKLVEPQISELNHRFAAISHRIKTGKASIPLKELEQFNSDIQKLLEPLEAEIQQGVNLKEEDFNKDMNEDNEGTVKELLQRGDNLQQRITDERKREEIKIKQQLLQTKHNALKDLRSQRRKKALEISHQWYQYKRQADDLLKCLDDIEKKLASLPEPRDERKIKEIDRELQKKKEELNAVRRQAEGLSEDGAAMAVEPTQIQLSKRWREIESKFAQFRRLNFAQIHTVREETMMVMTEDMPLEISYVPSTYLTEITHVSQALLEVEQLLNAPDLCAKDFEDLFKQEESLKNIKDSLQQSSGRIDIIHSKKTAALQSATPVERVKLQEALSQLDFQWEKVNKMYKDRQGRFDRSVEKWRRFHYDIKIFNQWLTEAEQFLRKTQIPENWEHAKYKWYLKELQDGIGQRQTVVRTLNATGEEIIQQSSKTDASILQEKLGSLNLRWQEVCKQLSDRKKRLEEQKNILSEFQRDLNEFVLWLEEADNIASIPLEPGKEQQLKEKLEQVKLLVEELPLRQGILKQLNETGGPVLVSAPISPEEQDKLENKLKQTNLQWIKVSRALPEKQGEIEAQIKDLGQLEKKLEDLEEQLNHLLLWLSPIRNQLEIYNQPNQEGPFDVKETEIAVQAKQPDVEEILSKGQHLYKEKPATQPVKRKLEDLSSEWKAVNRLLQELRAKQPDLAPGLTTIGASPTQTVTLVTQPVVTKETAISKLEMPSSLMLEVPALADFNRAWTELTDWLSLLDQVIKSQRVMVGDLEDINEMIIKQKATMQDLEQRRPQLEELITAAQNLKNKTSNQEARTIITDRIERIQNQWDEVQEHLQNRRQQLNEMLKDSTQWLEAKEEAEQVLGQARAKLESWKEGPYTVDAIQKKITETKQLAKDLRQWQTNVDVANDLALKLLRDYSADDTRKVHMITENINASWRSIHKRVSEREAALEETHRLLQQFPLDLEKFLAWLTEAETTANVLQDATRKERLLEDSKGVKELMKQWQDLQGEIEAHTDVYHNLDENSQKILRSLEGSDDAVLLQRRLDNMNFKWSELRKKSLNIRSHLEASSDQWKRLHLSLQELLVWLQLKDDELSRQAPIGGDFPAVQKQNDVHRAFKRELKTKEPVIMSTLETVRIFLTEQPLEGLEKLYQEPRELPPEERAQNVTRLLRKQAEEVNTEWEKLNLHSADWQRKIDETLERLRELQEATDELDLKLRQAEVIKGSWQPVGDLLIDSLQDHLEKVKALRGEIAPLKENVSHVNDLARQLTTLGIQLSPYNLSTLEDLNTRWKLLQVAVEDRVRQLHEAHRDFGPASQHFLSTSVQGPWERAISPNKVPYYINHETQTTCWDHPKMTELYQSLADLNNVRFSAYRTAMKLRRLQKALCLDLLSLSAACDALDQHNLKQNDQPMDILQIINCLTTIYDRLEQEHNNLVNVPLCVDMCLNWLLNVYDTGRTGRIRVLSFKTGIISLCKAHLEDKYRYLFKQVASSTGFCDQRRLGLLLHDSIQIPRQLGEVASFGGSNIEPSVRSCFQFANNKPEIEAALFLDWMRLEPQSMVWLPVLHRVAAAETAKHQAKCNICKECPIIGFRYRSLKHFNYDICQSCFFSGRVAKGHKMHYPMVEYCTPTTSGEDVRDFAKVLKNKFRTKRYFAKHPRMGYLPVQTVLEGDNMETPVTLINFWPVDSAPASSPQLSHDDTHSRIEHYASRLAEMENSNGSYLNDSISPNESIDDEHLLIQHYCQSLNQDSPLSQPRSPAQILISLESEERGELERILADLEEENRNLQAEYDRLKQQHEHKGLSPLPSPPEMMPTSPQSPRDAELIAEAKLLRQHKGRLEARMQILEDHNKQLESQLHRLRQLLEQPQAEAKVNGTTVSSPSTSLQRSDSSQPMLLRVVGSQTSDSMGEEDLLSPPQDTSTGLEEVMEQLNNSFPSSRGHNVGSLFHMADDLGRAMESLVSVMTDEEGAE

SEQ ID NO: 50 - DNA, 8499 bp, Homo sapiens
tttcatcagagcatcttcacacatcagtgttcactctctatagatttatttgcatattgtctaaatatgtttttttctgttattattttacactttttattttgcttcattctctgttgagttcctcaaacctttaaaaaggaaataaataacttattcacttaccctctaaattatattctatgtggacggtccctaataaataatgagttatcactccaaattgtttcaaatcccaagacaccagaggaatttagaagaaagaaaatgttagaccaatttcaatatttacttaattagaatatctaaaaccaagcattcaaaggataactgaaataatatttgggttattgagcgaggatgacagtcatgcctttcatatttgtaaacttcaaaggatgacaataaagggacaacagcctttgaaattttgagagaagtatttgctgcttgcaagtcggttgatgtggttagctaactgccctgggccctgtattggttttgctcaataggaaattgatcgggaattgcagaagaagaaagaggagctgaatgcagtgcgtaggcaagctgagggcttgtctgaggatggggccgcaatggcagtggagccaactcagatccagctcagcaagcgctggcgggaaattgagagcaaatttgctcagtttcgaagactcaactttgcacaaattcacactgtccgtgaagaaacgatgatggtgatgactgaagacatgcctttggaaatttcttatgtgccttctacttatttgactgaaatcactcatgtctcacaagccctattagaagtggaacaacttctcaatgctcctgacctctgtgctaaggactttgaagatctctttaagcaagaggagtctctgaagaatataaaagatagtctacaacaaagctcaggtcggattgacattattcatagcaagaagacagcagcattgcaaagtgcaacgcctgtggaaagggtgaagctacaggaagctctctcccagcttgatttccaatgggaaaaagttaacaaaatgtacaaggaccgacaagggcgatttgacagatctgttgagaaatggcggcgttttcattatgatataaagatatttaatcagtggctaacagaagctgaacagtttctcagaaagacacaaattcctgagaattgggaacatgctaaatacaaatggtatcttaaggaactccaggatggcattgggcagcggcaaactgttgtcagaacattgaatgcaactggggaagaaataattcagcaatcctcaaaaacagatgccagtattctacaggaaaaattgggaagcctgaatctgcggtggcaggaggtctgcaaacagctgtcagacagaaaaaagaggctagaagaacaaaagaatatcttgtcagaatttcaaagagatttaaatgaatttgttttatggttggaggaagcagataacattgctagtatcccacttgaacctggaaaagagcagcaactaaaagaaaagcttgagcaagtcaagttactggtggaagagttgcccctgcgccagggaattctcaaacaattaaatgaaactggaggacccgtgcttgtaagtgctcccataagcccagaagagcaagataaacttgaaaataagctcaagcagacaaatctccagtggataaaggtttccagagctttacctgagaaacaaggagaaattgaagctcaaataaaagaccttgggcagcttgaaaaaaagcttgaagaccttgaagagcagttaaatcatctgctgctgtggttatctcctattaggaatcagttggaaatttataaccaaccaaaccaagaaggaccatttgacgttaaggaaactgaaatagcagttcaagctaaacaaccggatgtggaagagattttgtctaaagggcagcatttgtacaaggaaaaaccagccactcagccagtgaagaggaagttagaagatctgagctctgagtggaaggcggtaaaccgtttacttcaagagctgagggcaaagcagcctgacctagctcctggactgaccactattggagcctctcctactcagactgttactctggtgacacaacctgtggttactaaggaaactgccatctccaaactagaaatgccatcttccttgatgttggaggtacctgctctggcagatttcaaccgggcttggacagaacttaccgactggctttctctgcttgatcaagttataaaatcacagagggtgatggtgggtgaccttgaggatatcaacgagatgatcatcaagcagaaggcaacaatgcaggatttggaacagaggcgtccccagttggaagaactcattaccgctgcccaaaatttgaaaaacaagaccagcaatcaagaggctagaacaatcattacggatcgaattgaaagaattcagaatcagtgggatgaagtacaagaacaccttcagaaccggaggcaacagttgaatgaaatgttaaaggattcaacacaatggctggaagctaaggaagaagctgagcaggtcttaggacaggccagagccaagcttgagtcatggaaggagggtccctatacagtagatgcaatccaaaagaaaatcacagaaaccaagcagttggccaaagacctccgccagtggcagacaaatgtagatgtggcaaatgacttggccctgaaacttctccgggattattctgcagatgataccagaaaagtccacatgataacagagaatatcaatgcctcttggagaagcattcataaaagggtgagtgagcgagaggctgctttggaagaaactcatagattactgcaacagttccccctggacctggaaaagtttcttgcctggcttacagaagctgaaacaactgccaatgtcctacaggatgctacccgtaaggaaaggctcctagaagactccaagggagtaaaagagctgatgaaacaatggcaagacctccaaggtgaaattgaagctcacacagatgtttatcacaacctggatgaaaacagccaaaaaatcctgagatccctggaaggttccgatgatgcagtcctgttacaaagacgtttggataacatgaacttcaagtggagtgaacttcggaaaaagtctctcaacattaggtcccatttggaagccagttctgaccagtggaagcgtctgcacctttctctgcaggaacttctggtgtggctacagctgaaagatgatgaattaagccggcaggcacctattggaggcgactttccagcagttcagaagcagaacgatgtacatagggccttcaagagggaattgaaaactaaagaacctgtaatcatgagtactcttgagactgtacgaatatttctgacagagcagcctttggaaggactagagaaactctaccaggagcccagagagctgcctcctgaggagagagcccagaatgtcactcggcttctacgaaagcaggctgaggaggtcaatactgagtgggaaaaattgaacctgcactccgctgactggcagagaaaaatagatgagacccttgaaagactccgggaacttcaagaggccacggatgagctggacctcaagctgcgccaagctgaggtgatcaagggatcctggcagcccgtgggcgatctcctcattgactctctccaagatcacctcgagaaagtcaaggcacttcgaggagaaattgcgcctctgaaagagaacgtgagccacgtcaatgaccttgctcgccagcttaccactttgggcattcagctctcaccgtataacctcagcactctggaagacctgaacaccagatggaagcttctgcaggtggccgtcgaggaccgagtcaggcagctgcatgaagcccacagggactttggtccagcatctcagcactttctttccacgtctgtccagggtccctgggagagagccatctcgccaaacaaagtgccctactatatcaaccacgagactcaaacaacttgctgggaccatcccaaaatgacagagctctaccagtctttagctgacctgaataatgtcagattctcagcttataggactgccatgaaactccgaagactgcagaaggccctttgcttggatctcttgagcctgtcagctgcatgtgatgccttggaccagcacaacctcaagcaaaatgaccagcccatggatatcctgcagattattaattgtttgaccactatttatgaccgcctggagcaagagcacaacaatttggtcaacgtccctctctgcgtggatatgtgtctgaactggctgctgaatgtttatgatacgggacgaacagggaggatccgtgtcctgtcttttaaaactggcatcatttccctgtgtaaagcacatttggaagacaagtacagataccttttcaagcaagtggcaagttcaacaggattttgtgaccagcgcaggctgggcctccttctgcatgattctatccaaattccaagacagttgggtgaagttgcatcctttgggggcagtaacattgagccaagtgtccggagctgcttccaatttgctaataataagccagagatcgaagcggccctcttcctagactggatgagactggaaccccagtccatggtgtggctgcccgtcctgcacagagtggctgctgcagaaactgccaagcatcaggccaaatgtaacatctgcaaagagtgtccaatcattggattcaggtacaggagtctaaagcactttaattatgacatctgccaaagctgctttttttctggtcgagttgcaaaaggccataaaatgcactatcccatggtggaatattgcactccgactacatcaggagaagatgttcgagactttgccaaggtactaaaaaacaaatttcgaaccaaaaggtattttgcgaagcatccccgaatgggctacctgccagtgcagactgtcttagagggggacaacatggaaactcccgttactctgatcaacttctggccagtagattctgcgcctgcctcgtcccctcagctttcacacgatgatactcattcacgcattgaacattatgctagcaggctagcagaaatggaaaacagcaatggatcttatctaaatgatagcatctctcctaatgagagcatagatgatgaacatttgttaatccagcattactgccaaagtttgaaccaggactcccccctgagccagcctcgtagtcctgcccagatcttgatttccttagagagtgaggaaagaggggagctagagagaatcctagcagatcttgaggaagaaaacaggaatctgcaagcagaatatgaccgtctaaagcagcagcacgaacataaaggcctgtccccactgccgtcccctcctgaaatgatgcccacctctccccagagtccccgggatgctgagctcattgctgaggccaagctactgcgtcaacacaaaggccgcctggaagccaggatgcaaatcctggaagaccacaataaacagctggagtcacagttacacaggctaaggcagctgctggagcaaccccaggcagaggccaaagtgaatggcacaacggtgtcctctccttctacctctctacagaggtccgacagcagtcagcctatgctgctccgagtggttggcagtcaaacttcggactccatgggtgaggaagatcttctcagtcctccccaggacacaagcacagggttagaggaggtgatggagcaactcaacaactccttccctagttcaagaggacacaatgtaggaagtcttttccacatggcagatgatttgggcagagcgatggagtccttagtatcagtcatgacagatgaagaaggagcagaataaatgttttacaactcctgattcccgcatggtttttataatattcatacaacaaagaggattagacagtaagagtttacaagaaataaatctatatttttgtgaagggtagtggtattatactgtagatttcagtagtttctaagtctgttattgttttgttaacaatggcaggttttacacgtctatgcaattgtacaaaaaagttataagaaaactacatgtaaaatcttgatagctaaataacttgccatttctttatatggaacgcattttgggttgtttaaaaatttataacagttataaagaaagattgtaaactaaagtgtgctttataaaaaaaagttgtttataaaaacccctaaaaacaaaacaaacacacacacacacacatacacacacacacacaaaactttgaggcagcgcattgttttgcatccttttggcgtgatatccatatgaaattcatggctttttctttttttgcatattaaagataagacttcctctaccaccacaccaaatgactactacacactgctcatttgagaactgtcagctgagtggggcaggcttgagttttcatttcatatatctatatgtctataagtatataaatactatagttatatagataaagagatacgaatttctatagactgactttttccattttttaaatgttcatgtcacatcctaatagaaagaaattacttctagtcagtcatccaggcttacctgcttggtctagaatggatttttcccggagccggaagccaggaggaaactacaccacactaaaacattgtctacagctccagatgtttctcattttaaacaactttccactgacaacgaaagtaaagtaaagtattggatttttttaaagggaacatgtgaatgaatacacaggacttattatatcagagtgagtaatcggttggttggttgattgattgattgattgatacattcagcttcctgctgctagcaatgccacgatttagatttaatgatgcttcagtggaaatcaatcagaaggtattctgaccttgtgaacatcagaaggtattttttaactcccaagcagtagcaggacgatgatagggctggagggctatggattcccagcccatccctgtgaaggagtaggccactctttaagtgaaggattggatgattgttcataatacataaagttctctgtaattacaactaaattattatgccctcttctcacagtcaaaaggaactgggtggtttggtttttgttgcttttttagatttattgtcccatgtgggatgagtttttaaatgccacaagacataatttaaaataaataaactttgggaaaaggtgtaaaacagtagccccatcacatttgtgatactgacaggtatcaacccagaagcccatgaactgtgtttccatcctttgcatttctctgcgagtagttccacacaggtttgtaagtaagtaagaaagaaggcaaattgattcaaatgttacaaaaaaacccttcttggtggattagacaggttaaatatataaacaaacaaacaaaaattgctcaaaaaagaggagaaaagctcaagaggaaaagctaaggactggtaggaaaaagctttactctttcatgccattttatttctttttgatttttaaatcattcattcaatagataccaccgtgtgacctataattttgcaaatctgttacctctgacatcaagtgtaattagcttttggagagtgggctgacatcaagtgtaattagcttttggagagtgggttttgtccattattaataattaattaattaacatcaaacacggcttctcatgctatttctacctcactttggttttggggtgttcctgataattgtgcacacctgagttcacagcttcaccacttgtccattgcgttattttctttttcctttataattctttctttttccttcataattttcaaaagaaaacccaaagctctaaggtaacaaattaccaaattacatgaagatttggtttttgtcttgcatttttttcctttatgtgacgctggaccttttctttacccaaggatttttaaaactcagatttaaaacaaggggttactttacatcctactaagaagtttaagtaagtaagtttcattctaaaatcagaggtaaatagagtgcataaataattttgttttaatctttttgtttttcttttagacacattagctctggagtgagtctgtcataatatttgaacaaaaattgagagctttattgctgcattttaagcataattaatttggacattatttcgtgttgtgttctttataaccaccaagtattaaactgtaaatcataatgtaactgaagcataaacatcacatggcatgttttgtcattgttttcaggtactgagttcttacttgagtatcataatatattgtgttttaacaccaacactgtaacatttacgaattatttttttaaacttcagttttactgcattttcacaacatatcagacttcaccaaatatatgccttactattgtattatagtactgctttactgtgtatctcaataaagcacgcagttatgttacaaaaaagta

SEQ ID NO: 51 - protein, 1761 aa, Homo sapiens
MAVEPTQIQLSKRWREIESKFAQFRRLNFAQIHTVREETMMVMTEDMPLEISYVPSTYLTEITHVSQALLEVEQLLNAPDLCAKDFEDLFKQEESLKNIKDSLQQSSGRIDIIHSKKTAALQSATPVERVKLQEALSQLDFQWEKVNKMYKDRQGRFDRSVEKWRRFHYDIKIFNQWLTEAEQFLRKTQIPENWEHAKYKWYLKELQDGIGQRQTVVRTLNATGEEIIQQSSKTDASILQEKLGSLNLRWQEVCKQLSDRKKRLEEQKNILSEFQRDLNEFVLWLEEADNIASIPLEPGKEQQLKEKLEQVKLLVEELPLRQGILKQLNETGGPVLVSAPISPEEQDKLENKLKQTNLQWIKVSRALPEKQGEIEAQIKDLGQLEKKLEDLEEQLNHLLLWLSPIRNQLEIYNQPNQEGPFDVKETEIAVQAKQPDVEEILSKGQHLYKEKPATQPVKRKLEDLSSEWKAVNRLLQELRAKQPDLAPGLTTIGASPTQTVTLVTQPVVTKETAISKLEMPSSLMLEVPALADFNRAWTELTDWLSLLDQVIKSQRVMVGDLEDINEMIIKQKATMQDLEQRRPQLEELITAAQNLKNKTSNQEARTIITDRIERIQNQWDEVQEHLQNRRQQLNEMLKDSTQWLEAKEEAEQVLGQARAKLESWKEGPYTVDAIQKKITETKQLAKDLRQWQTNVDVANDLALKLLRDYSADDTRKVHMITENINASWRSIHKRVSEREAALEETHRLLQQFPLDLEKFLAWLTEAETTANVLQDATRKERLLEDSKGVKELMKQWQDLQGEIEAHTDVYHNLDENSQKILRSLEGSDDAVLLQRRLDNMNFKWSELRKKSLNIRSHLEASSDQWKRLHLSLQELLVWLQLKDDELSRQAPIGGDFPAVQKQNDVHRAFKRELKTKEPVIMSTLETVRIFLTEQPLEGLEKLYQEPRELPPEERAQNVTRLLRKQAEEVNTEWEKLNLHSADWQRKIDETLERLRELQEATDELDLKLRQAEVIKGSWQPVGDLLIDSLQDHLEKVKALRGEIAPLKENVSHVNDLARQLTTLGIQLSPYNLSTLEDLNTRWKLLQVAVEDRVRQLHEAHRDFGPASQHFLSTSVQGPWERAISPNKVPYYINHETQTTCWDHPKMTELYQSLADLNNVRFSAYRTAMKLRRLQKALCLDLLSLSAACDALDQHNLKQNDQPMDILQIINCLTTIYDRLEQEHNNLVNVPLCVDMCLNWLLNVYDTGRTGRIRVLSFKTGIISLCKAHLEDKYRYLFKQVASSTGFCDQRRLGLLLHDSIQIPRQLGEVASFGGSNIEPSVRSCFQFANNKPEIEAALFLDWMRLEPQSMVWLPVLHRVAAAETAKHQAKCNICKECPIIGFRYRSLKHFNYDICQSCFFSGRVAKGHKMHYPMVEYCTPTTSGEDVRDFAKVLKNKFRTKRYFAKHPRMGYLPVQTVLEGDNMETPVTLINFWPVDSAPASSPQLSHDDTHSRIEHYASRLAEMENSNGSYLNDSISPNESIDDEHLLIQHYCQSLNQDSPLSQPRSPAQILISLESEERGELERILADLEEENRNLQAEYDRLKQQHEHKGLSPLPSPPEMMPTSPQSPRDAELIAEAKLLRQHKGRLEARMQILEDHNKQLESQLHRLRQLLEQPQAEAKVNGTTVSSPSTSLQRSDSSQPMLLRVVGSQTSDSMGEEDLLSPPQDTSTGLEEVMEQLNNSFPSSRGHNVGSLFHMADDLGRAMESLVSVMTDEEGAE

SEQ ID NO: 52 - DNA, 13875 bp, Homo sapiens
actttccccctacaggactcagatctgggaggcaattaccttcggagaaaaacgaataggaaaaactgaagtgttactttttttaaagctgctgaagtttgttggtttctcattgtttttaagcctactggagcaataaagtttgaagaacttttaccaggttttttttatcgctgccttgatatacacttttcaaaatgctttggtgggaagaagtagaggactgttatgaaagagaagatgttcaaaagaaaacattcacaaaatgggtaaatgcacaattttctaagtttgggaagcagcatattgagaacctcttcagtgacctacaggatgggaggcgcctcctagacctcctcgaaggcctgacagggcaaaaactgccaaaagaaaaaggatccacaagagttcatgccctgaacaatgtcaacaaggcactgcgggttttgcagaacaataatgttgatttagtgaatattggaagtactgacatcgtagatggaaatcataaactgactcttggtttgatttggaatataatcctccactggcaggtcaaaaatgtaatgaaaaatatcatggctggattgcaacaaaccaacagtgaaaagattctcctgagctgggtccgacaatcaactcgtaattatccacaggttaatgtaatcaacttcaccaccagctggtctgatggcctggctttgaatgctctcatccatagtcataggccagacctatttgactggaatagtgtggtttgccagcagtcagccacacaacgactggaacatgcattcaacatcgccagatatcaattaggcatagagaaactactcgatcctgaagatgttgataccacctatccagataagaagtccatcttaatgtacatcacatcactcttccaagttttgcctcaacaagtgagcattgaagccatccaggaagtggaaatgttgccaaggccacctaaagtgactaaagaagaacattttcagttacatcatcaaatgcactattctcaacagatcacggtcagtctagcacagggatatgagagaacttcttcccctaagcctcgattcaagagctatgcctacacacaggctgcttatgtcaccacctctgaccctacacggagcccatttccttcacagcatttggaagctcctgaagacaagtcatttggcagttcattgatggagagtgaagtaaacctggaccgttatcaaacagctttagaagaagtattatcgtggcttctttctgctgaggacacattgcaagcacaaggagagatttctaatgatgtggaagtggtgaaagaccagtttcatactcatgaggggtacatgatggatttgacagcccatcagggccgggttggtaatattctacaattgggaagtaagctgattggaacaggaaaattatcagaagatgaagaaactgaagtacaagagcagatgaatctcctaaattcaagatgggaatgcctcagggtagctagcatggaaaaacaaagcaatttacatagagttttaatggatctccagaatcagaaactgaaagagttgaatgactggctaacaaaaacagaagaaagaacaaggaaaatggaggaagagcctcttggacctgatcttgaagacctaaaacgccaagtacaacaacataaggtgcttcaagaagatctagaacaagaacaagtcagggtcaattctctcactcacatggtggtggtagttgatgaatctagtggagatcacgcaactgctgctttggaagaacaacttaaggtattgggagatcgatgggcaaacatctgtagatggacagaagaccgctgggttcttttacaagacatccttctcaaatggcaacgtcttactgaagaacagtgcctttttagtgcatggctttcagaaaaagaagatgcagtgaacaagattcacacaactggctttaaagatcaaaatgaaatgttatcaagtcttcaaaaactggccgttttaaaagcggatctagaaaagaaaaagcaatccatgggcaaactgtattcactcaaacaagatcttctttcaacactgaagaataagtcagtgacccagaagacggaagcatggctggataactttgcccggtgttgggataatttagtccaaaaacttgaaaagagtacagcacagatttcacaggctgtcaccaccactcagccatcactaacacagacaactgtaatggaaacagtaactacggtgaccacaagggaacagatcctggtaaagcatgctcaagaggaacttccaccaccacctccccaaaagaagaggcagattactgtggattctgaaattaggaaaaggttggatgttgatataactgaacttcacagctggattactcgctcagaagctgtgttgcagagtcctgaatttgcaatctttcggaaggaaggcaacttctcagacttaaaagaaaaagtcaatgccatagagcgagaaaaagctgagaagttcagaaaactgcaagatgccagcagatcagctcaggccctggtggaacagatggtgaatgagggtgttaatgcagatagcatcaaacaagcctcagaacaactgaacagccggtggatcgaattctgccagttgctaagtgagagacttaactggctggagtatcagaacaacatcatcgctttctataatcagctacaacaattggagcagatgacaactactgctgaaaactggttgaaaatccaacccaccaccccatcagagccaacagcaattaaaagtcagttaaaaatttgtaaggatgaagtcaaccggctatcagatcttcaacctcaaattgaacgattaaaaattcaaagcatagccctgaaagagaaaggacaaggacccatgttcctggatgcagactttgtggcctttacaaatcattttaagcaagtcttttctgatgtgcaggccagagagaaagagctacagacaatttttgacactttgccaccaatgcgctatcaggagaccatgagtgccatcaggacatgggtccagcagtcagaaaccaaactctccatacctcaacttagtgtcaccgactatgaaatcatggagcagagactcggggaattgcaggctttacaaagttctctgcaagagcaacaaagtggcctatactatctcagcaccactgtgaaagagatgtcgaagaaagcgccctctgaaattagccggaaatatcaatcagaatttgaagaaattgagggacgctggaagaagctctcctcccagctggttgagcattgtcaaaagctagaggagcaaatgaataaactccgaaaaattcagaatcacatacaaaccctgaagaaatggatggctgaagttgatgtttttctgaaggaggaatggcctgcccttggggattcagaaattctaaaaaagcagctgaaacagtgcagacttttagtcagtgatattcagacaattcagcccagtctaaacagtgtcaatgaaggtgggcagaagataaagaatgaagcagagccagagtttgcttcgagacttgagacagaactcaaagaacttaacactcagtgggatcacatgtgccaacaggtctatgccagaaaggaggccttgaagggaggtttggagaaaactgtaagcctccagaaagatctatcagagatgcacgaatggatgacacaagctgaagaagagtatcttgagagagattttgaatataaaactccagatgaattacagaaagcagttgaagagatgaagagagctaaagaagaggcccaacaaaaagaagcgaaagtgaaactccttactgagtctgtaaatagtgtcatagctcaagctccacctgtagcacaagaggccttaaaaaaggaacttgaaactctaaccaccaactaccagtggctctgcactaggctgaatgggaaatgcaagactttggaagaagtttgggcatgttggcatgagttattgtcatacttggagaaagcaaacaagtggctaaatgaagtagaatttaaacttaaaaccactgaaaacattcctggcggagctgaggaaatctctgaggtgctagattcacttgaaaatttgatgcgacattcagaggataacccaaatcagattcgcatattggcacagaccctaacagatggcggagtcatggatgagctaatcaatgaggaacttgagacatttaattctcgttggagggaactacatgaagaggctgtaaggaggcaaaagttgcttgaacagagcatccagtctgcccaggagactgaaaaatccttacacttaatccaggagtccctcacattcattgacaagcagttggcagcttatattgcagacaaggtggacgcagctcaaatgcctcaggaagcccagaaaatccaatctgatttgacaagtcatgagatcagtttagaagaaatgaagaaacataatcaggggaaggaggctgcccaaagagtcctgtctcagattgatgttgcacagaaaaaattacaagatgtctccatgaagtttcgattattccagaaaccagccaattttgagcagcgtctacaagaaagtaagatgattttagatgaagtgaagatgcacttgcctgcattggaaacaaagagtgtggaacaggaagtagtacagtcacagctaaatcattgtgtgaacttgtataaaagtctgagtgaagtgaagtctgaagtggaaatggtgataaagactggacgtcagattgtacagaaaaagcagacggaaaatcccaaagaacttgatgaaagagtaacagctttgaaattgcattataatgagctgggagcaaaggtaacagaaagaaagcaacagttggagaaatgcttgaaattgtcccgtaagatgcgaaaggaaatgaatgtcttgacagaatggctggcagctacagatatggaattgacaaagagatcagcagttgaaggaatgcctagtaatttggattctgaagttgcctggggaaaggctactcaaaaagagattgagaaacagaaggtgcacctgaagagtatcacagaggtaggagaggccttgaaaacagttttgggcaagaaggagacgttggtggaagataaactcagtcttctgaatagtaactggatagctgtcacctcccgagcagaagagtggttaaatcttttgttggaataccagaaacacatggaaacttttgaccagaatgtggaccacatcacaaagtggatcattcaggctgacacacttttggatgaatcagagaaaaagaaaccccagcaaaaagaagacgtgcttaagcgtttaaaggcagaactgaatgacatacgcccaaaggtggactctacacgtgaccaagcagcaaacttgatggcaaaccgcggtgaccactgcaggaaattagtagagccccaaatctcagagctcaaccatcgatttgcagccatttcacacagaattaagactggaaaggcctccattcctttgaaggaattggagcagtttaactcagatatacaaaaattgcttgaaccactggaggctgaaattcagcagggggtgaatctgaaagaggaagacttcaataaagatatgaatgaagacaatgagggtactgtaaaagaattgttgcaaagaggagacaacttacaacaaagaatcacagatgagagaaagcgagaggaaataaagataaaacagcagctgttacagacaaaacataatgctctcaaggatttgaggtctcaaagaagaaaaaaggctctagaaatttctcatcagtggtatcagtacaagaggcaggctgatgatctcctgaaatgcttggatgacattgaaaaaaaattagccagcctacctgagcccagagatgaaaggaaaataaaggaaattgatcgggaattgcagaagaagaaagaggagctgaatgcagtgcgtaggcaagctgagggcttgtctgaggatggggccgcaatggcagtggagccaactcagatccagctcagcaagcgctggcgggaaattgagagcaaatttgctcagtttcgaagactcaactttgcacaaattcacactgtccgtgaagaaacgatgatggtgatgactgaagacatgcctttggaaatttcttatgtgccttctacttatttgactgaaatcactcatgtctcacaagccctattagaagtggaacaacttctcaatgctcctgacctctgtgctaaggactttgaagatctctttaagcaagaggagtctctgaagaatataaaagatagtctacaacaaagctcaggtcggattgacattattcatagcaagaagacagcagcattgcaaagtgcaacgcctgtggaaagggtgaagctacaggaagctctctcccagcttgatttccaatgggaaaaagttaacaaaatgtacaaggaccgacaagggcgatttgacagatctgttgagaaatggcggcgttttcattatgatataaagatatttaatcagtggctaacagaagctgaacagtttctcagaaagacacaaattcctgagaattgggaacatgctaaatacaaatggtatcttaaggaactccaggatggcattgggcagcggcaaactgttgtcagaacattgaatgcaactggggaagaaataattcagcaatcctcaaaaacagatgccagtattctacaggaaaaattgggaagcctgaatctgcggtggcaggaggtctgcaaacagctgtcagacagaaaaaagaggctagaagaacaaaagaatatcttgtcagaatttcaaagagatttaaatgaatttgttttatggttggaggaagcagataacattgctagtatcccacttgaacctggaaaagagcagcaactaaaagaaaagcttgagcaagtcaagttactggtggaagagttgcccctgcgccagggaattctcaaacaattaaatgaaactggaggacccgtgcttgtaagtgctcccataagcccagaagagcaagataaacttgaaaataagctcaagcagacaaatctccagtggataaaggtttccagagctttacctgagaaacaaggagaaattgaagctcaaataaaagaccttgggcagcttgaaaaaaagcttgaagaccttgaagagcagttaaatcatctgctgctgtggttatctcctattaggaatcagttggaaatttataaccaaccaaaccaagaaggaccatttgacgttaaggaaactgaaatagcagttcaagctaaacaaccggatgtggaagagattttgtctaaagggcagcatttgtacaaggaaaaaccagccactcagccagtgaagaggaagttagaagatctgagctctgagtggaaggcggtaaaccgtttacttcaagagctgagggcaaagcagcctgacctagctcctggactgaccactattggagcctctcctactcagactgttactctggtgacacaacctgtggttactaaggaaactgccatctccaaactagaaatgccatcttccttgatgttggaggtacctgctctggcagatttcaaccgggcttggacagaacttaccgactggctttctctgcttgatcaagttataaaatcacagagggtgatggtgggtgaccttgaggatatcaacgagatgatcatcaagcagaaggcaacaatgcaggatttggaacagaggcgtccccagttggaagaactcattaccgctgcccaaaatttgaaaaacaagaccagcaatcaagaggctagaacaatcattacggatcgaattgaaagaattcagaatcagtgggatgaagtacaagaacaccttcagaaccggaggcaacagttgaatgaaatgttaaaggattcaacacaatggctggaagctaaggaagaagctgagcaggtcttaggacaggccagagccaagcttgagtcatggaaggagggtccctatacagtagatgcaatccaaaagaaaatcacagaaaccaagcagttggccaaagacctccgccagtggcagacaaatgtagatgtggcaaatgacttggccctgaaacttctccgggattattctgcagatgataccagaaaagtccacatgataacagagaatatcaatgcctcttggagaagcattcataaaagggtgagtgagcgagaggctgctttggaagaaactcatagattactgcaacagttccccctggacctggaaaagtttcttgcctggcttacagaagctgaaacaactgccaatgtcctacaggatgctacccgtaaggaaaggctcctagaagactccaagggagtaaaagagctgatgaaacaatggcaagacctccaaggtgaaattgaagctcacacagatgtttatcacaacctggatgaaaacagccaaaaaatcctgagatccctggaaggttccgatgatgcagtcctgttacaaagacgtttggataacatgaacttcaagtggagtgaacttcggaaaaagtctctcaacattaggtcccatttggaagccagttctgaccagtggaagcgtctgcacctttctctgcaggaacttctggtgtggctacagctgaaagatgatgaattaagccggcaggcacctattggaggcgactttccagcagttcagaagcagaacgatgtacatagggccttcaagagggaattgaaaactaaagaacctgtaatcatgagtactcttgagactgtacgaatatttctgacagagcagcctttggaaggactagagaaactctaccaggagcccagagagctgcctcctgaggagagagcccagaatgtcactcggcttctacgaaagcaggctgaggaggtcaatactgagtgggaaaaattgaacctgcactccgctgactggcagagaaaaatagatgagacccttgaaagactccgggaacttcaagaggccacggatgagctggacctcaagctgcgccaagctgaggtgatcaagggatcctggcagcccgtgggcgatctcctcattgactctctccaagatcacctcgagaaagtcaaggcacttcgaggagaaattgcgcctctgaaagagaacgtgagccacgtcaatgaccttgctcgccagcttaccactttgggcattcagctctcaccgtataacctcagcactctggaagacctgaacaccagatggaagcttctgcaggtggccgtcgaggaccgagtcaggcagctgcatgaagcccacagggactttggtccagcatctcagcactttctttccacgtctgtccagggtccctgggagagagccatctcgccaaacaaagtgccctactatatcaaccacgagactcaaacaacttgctgggaccatcccaaaatgacagagctctaccagtctttagctgacctgaataatgtcagattctcagcttataggactgccatgaaactccgaagactgcagaaggccctttgcttggatctcttgagcctgtcagctgcatgtgatgccttggaccagcacaacctcaagcaaaatgaccagcccatggatatcctgcagattattaattgtttgaccactatttatgaccgcctggagcaagagcacaacaatttggtcaacgtccctctctgcgtggatatgtgtctgaactggctgctgaatgtttatgatacgggacgaacagggaggatccgtgtcctgtcttttaaaactggcatcatttccctgtgtaaagcacatttggaagacaagtacagataccttttcaagcaagtggcaagttcaacaggattttgtgaccagcgcaggctgggcctccttctgcatgattctatccaaattccaagacagttgggtgaagttgcatcctttgggggcagtaacattgagccaagtgtccggagctgcttccaatttgctaataataagccagagatcgaagcggccctcttcctagactggatgagactggaaccccagtccatggtgtggctgcccgtcctgcacagagtggctgctgcagaaactgccaagcatcaggccaaatgtaacatctgcaaagagtgtccaatcattggattcaggtacaggagtctaaagcactttaattatgacatctgccaaagctgctttttttctggtcgagttgcaaaaggccataaaatgcactatcccatggtggaatattgcactccgactacatcaggagaagatgttcgagactttgccaaggtactaaaaaacaaatttcgaaccaaaaggtattttgcgaagcatccccgaatgggctacctgccagtgcagactgtcttagagggggacaacatggaaacgcctgcctcgtcccctcagctttcacacgatgatactcattcacgcattgaacattatgctagcaggctagcagaaatggaaaacagcaatggatcttatctaaatgatagcatctctcctaatgagagcatagatgatgaacatttgttaatccagcattactgccaaagtttgaaccaggactcccccctgagccagcctcgtagtcctgcccagatcttgatttccttagagagtgaggaaagaggggagctagagagaatcctagcagatcttgaggaagaaaacaggaatctgcaagcagaatatgaccgtctaaagcagcagcacgaacataaaggcctgtccccactgccgtcccctcctgaaatgatgcccacctctccccagagtccccgggatgctgagctcattgctgaggccaagctactgcgtcaacacaaaggccgcctggaagccaggatgcaaatcctggaagaccacaataaacagctggagtcacagttacacaggctaaggcagctgctggagcaaccccaggcagaggccaaagtgaatggcacaacggtgtcctctccttctacctctctacagaggtccgacagcagtcagcctatgctgctccgagtggttggcagtcaaacttcggactccatgggtgaggaagatcttctcagtcctccccaggacacaagcacagggttagaggaggtgatggagcaactcaacaactccttccctagttcaagaggacacaatgtaggaagtcttttccacatggcagatgatttgggcagagcgatggagtccttagtatcagtcatgacagatgaagaaggagcagaataaatgttttacaactcctgattcccgcatggtttttataatattcatacaacaaagaggattagacagtaagagtttacaagaaataaatctatatttttgtgaagggtagtggtattatactgtagatttcagtagtttctaagtctgttattgttttgttaacaatggcaggttttacacgtctatgcaattgtacaaaaaagttataagaaaactacatgtaaaatcttgatagctaaataacttgccatttctttatatggaacgcattttgggttgtttaaaaatttataacagttataaagaaagattgtaaactaaagtgtgctttataaaaaaaagttgtttataaaaacccctaaaaacaaaacaaacacacacacacacacatacacacacacacacaaaactttgaggcagcgcattgttttgcatccttttggcgtgatatccatatgaaattcatggctttttctttttttgcatattaaagataagacttcctctaccaccacaccaaatgactactacacactgctcatttgagaactgtcagctgagtggggcaggcttgagttttcatttcatatatctatatgtctataagtatataaatactatagttatatagataaagagatacgaatttctatagactgactttttccattttttaaatgttcatgtcacatcctaatagaaagaaattacttctagtcagtcatccaggcttacctgcttggtctagaatggatttttcccggagccggaagccaggaggaaactacaccacactaaaacattgtctacagctccagatgtttctcattttaaacaactttccactgacaacgaaagtaaagtaaagtattggatttttttaaagggaacatgtgaatgaatacacaggacttattatatcagagtgagtaatcggttggttggttgattgattgattgattgatacattcagcttcctgctgctagcaatgccacgatttagatttaatgatgcttcagtggaaatcaatcagaaggtattctgaccttgtgaacatcagaaggtattttttaactcccaagcagtagcaggacgatgatagggctggagggctatggattcccagcccatccctgtgaaggagtaggccactctttaagtgaaggattggatgattgttcataatacataaagttctctgtaattacaactaaattattatgccctcttctcacagtcaaaaggaactgggtggtttggtttttgttgcttttttagatttattgtcccatgtgggatgagtttttaaatgccacaagacataatttaaaataaataaactttgggaaaaggtgtaaaacagtagccccatcacatttgtgatactgacaggtatcaacccagaagcccatgaactgtgtttccatcctttgcatttctctgcgagtagttccacacaggtttgtaagtaagtaagaaagaaggcaaattgattcaaatgttacaaaaaaacccttcttggtggattagacaggttaaatatataaacaaacaaacaaaaattgctcaaaaaagaggagaaaagctcaagaggaaaagctaaggactggtaggaaaaagctttactctttcatgccattttatttctttttgatttttaaatcattcattcaatagataccaccgtgtgacctataattttgcaaatctgttacctctgacatcaagtgtaattagcttttggagagtgggctgacatcaagtgtaattagcttttggagagtgggttttgtccattattaataattaattaattaacatcaaacacggcttctcatgctatttctacctcactttggttttggggtgttcctgataattgtgcacacctgagttcacagcttcaccacttgtccattgcgttattttctttttcctttataattctttctttttccttcataattttcaaaagaaaacccaaagctctaaggtaacaaattaccaaattacatgaagatttggtttttgtcttgcatttttttcctttatgtgacgctggaccttttctttacccaaggatttttaaaactcagatttaaaacaaggggttactttacatcctactaagaagtttaagtaagtaagtttcattctaaaatcagaggtaaatagagtgcataaataattttgttttaatctttttgtttttcttttagacacattagctctggagtgagtctgtcataatatttgaacaaaaattgagagctttattgctgcattttaagcataattaatttggacattatttcgtgttgtgttctttataaccaccaagtattaaactgtaaatcataatgtaactgaagcataaacatcacatggcatgttttgtcattgttttcaggtactgagttcttacttgagtatcataatatattgtgttttaacaccaacactgtaacatttacgaattatttttttaaacttcagttttactgcattttcacaacatatcagacttcaccaaatatatgccttactattgtattatagtactgctttactgtgtatctcaataaagcacgcagttatgttac

SEQ ID NO: 53 - protein, 3690 aa, Homo sapiens
MLWWEEVEDCYEREDVQKKTFTKWVNAQFSKFGKQHIENLFSDLQDGRRLLDLLEGLTGQKLPKEKGSTRVHALNNVNKALRVLQNNNVDLVNIGSTDIVDGNHKLTLGLIWNIILHWQVKNVMKNIMAGLQQTNSEKILLSWVRQSTRNYPQVNVINFTTSWSDGLALNALIHSHRPDLFDWNSVVCQQSATQRLEHAFNIARYQLGIEKLLDPEDVDTTYPDKKSILMYITSLFQVLPQQVSIEAIQEVEMLPRPPKVTKEEHFQLHHQMHYSQQITVSLAQGYERTSSPKPRFKSYAYTQAAYVTTSDPTRSPFPSQHLEAPEDKSFGSSLMESEVNLDRYQTALEEVLSWLLSAEDTLQAQGEISNDVEVVKDQFHTHEGYMMDLTAHQGRVGNILQLGSKLIGTGKLSEDEETEVQEQMNLLNSRWECLRVASMEKQSNLHRVLMDLQNQKLKELNDWLTKTEERTRKMEEEPLGPDLEDLKRQVQQHKVLQEDLEQEQVRVNSLTHMVVVVDESSGDHATAALEEQLKVLGDRWANICRWTEDRWVLLQDILLKWQRLTEEQCLFSAWLSEKEDAVNKIHTTGFKDQNEMLSSLQKLAVLKADLEKKKQSMGKLYSLKQDLLSTLKNKSVTQKTEAWLDNFARCWDNLVQKLEKSTAQISQAVTTTQPSLTQTTVMETVTTVTTREQILVKHAQEELPPPPPQKKRQITVDSEIRKRLDVDITELHSWITRSEAVLQSPEFAIFRKEGNFSDLKEKVNAIEREKAEKFRKLQDASRSAQALVEQMVNEGVNADSIKQASEQLNSRWIEFCQLLSERLNWLEYQNNIIAFYNQLQQLEQMTTTAENWLKIQPTTPSEPTAIKSQLKICKDEVNRLSDLQPQIERLKIQSIALKEKGQGPMFLDADFVAFTNHFKQVFSDVQAREKELQTIFDTLPPMRYQETMSAIRTWVQQSETKLSIPQLSVTDYEIMEQRLGELQALQSSLQEQQSGLYYLSTTVKEMSKKAPSEISRKYQSEFEEIEGRWKKLSSQLVEHCQKLEEQMNKLRKIQNHIQTLKKWMAEVDVFLKEEWPALGDSEILKKQLKQCRLLVSDIQTIQPSLNSVNEGGQKIKNEAEPEFASRLETELKELNTQWDHMCQQVYARKEALKGGLEKTVSLQKDLSEMHEWMTQAEEEYLERDFEYKTPDELQKAVEEMKRAKEEAQQKEAKVKLLTESVNSVIAQAPPVAQEALKKELETLTTNYQWLCTRLNGKCKTLEEVWACWHELLSYLEKANKWLNEVEFKLKTTENIPGGAEEISEVLDSLENLMRHSEDNPNQIRILAQTLTDGGVMDELINEELETFNSRWRELHEEAVRRQKLLEQSIQSAQETEKSLHLIQESLTFIDKQLAAYIADKVDAAQMPQEAQKIQSDLTSHEISLEEMKKHNQGKEAAQRVLSQIDVAQKKLQDVSMKFRLFQKPANFEQRLQESKMILDEVKMHLPALETKSVEQEVVQSQLNHCVNLYKSLSEVKSEVEMVIKTGRQIVQKKQTENPKELDERVTALKLHYNELGAKVTERKQQLEKCLKLSRKMRKEMNVLTEWLAATDMELTKRSAVEGMPSNLDSEVAWGKATQKEIEKQKVHLKSITEVGEALKTVLGKKETLVEDKLSLLNSNWIAVTSRAEEWLNLLLEYQKHMETFDQNVDHITKWIIQADTLLDESEKKKPQQKEDVLKRLKAELNDIRPKVDSTRDQAANLMANRGDHCRKLVEPQISELNHRFAAISHRIKTGKASIPLKELEQFNSDIQKLLEPLEAEIQQGVNLKEEDFNKDMNEDNEGTVKELLQRGDNLQQRITDERKREEIKIKQQLLQTKHNALKDLRSQRRKKALEISHQWYQYKRQADDLLKCLDDIEKKLASLPEPRDERKIKEIDRELQKKKEELNAVRRQAEGLSEDGAAMAVEPTQIQLSKRWREIESKFAQFRRLNFAQIHTVREETMMVMTEDMPLEISYVPSTYLTEITHVSQALLEVEQLLNAPDLCAKDFEDLFKQEESLKNIKDSLQQSSGRIDIIHSKKTAALQSATPVERVKLQEALSQLDFQWEKVNKMYKDRQGRFDRSVEKWRRFHYDIKIFNQWLTEAEQFLRKTQIPENWEHAKYKWYLKELQDGIGQRQTVVRTLNATGEEIIQQSSKTDASILQEKLGSLNLRWQEVCKQLSDRKKRLEEQKNILSEFQRDLNEFVLWLEEADNIASIPLEPGKEQQLKEKLEQVKLLVEELPLRQGILKQLNETGGPVLVSAPISPEEQDKLENKLKQTNLQWIKVSRALPEKQGEIEAQIKDLGQLEKKLEDLEEQLNHLLLWLSPIRNQLEIYNQPNQEGPFDVKETEIAVQAKQPDVEEILSKGQHLYKEKPATQPVKRKLEDLSSEWKAVNRLLQELRAKQPDLAPGLTTIGASPTQTVTLVTQPVVTKETAISKLEMPSSLMLEVPALADFNRAWTELTDWLSLLDQVIKSQRVMVGDLEDINEMIIKQKATMQDLEQRRPQLEELITAAQNLKNKTSNQEARTIITDRIERIQNQWDEVQEHLQNRRQQLNEMLKDSTQWLEAKEEAEQVLGQARAKLESWKEGPYTVDAIQKKITETKQLAKDLRQWQTNVDVANDLALKLLRDYSADDTRKVHMITENINASWRSIHKRVSEREAALEETHRLLQQFPLDLEKFLAWLTEAETTANVLQDATRKERLLEDSKGVKELMKQWQDLQGEIEAHTDVYHNLDENSQKILRSLEGSDDAVLLQRRLDNMNFKWSELRKKSLNIRSHLEASSDQWKRLHLSLQELLVWLQLKDDELSRQAPIGGDFPAVQKQNDVHRAFKRELKTKEPVIMSTLETVRIFLTEQPLEGLEKLYQEPRELPPEERAQNVTRLLRKQAEEVNTEWEKLNLHSADWQRKIDETLERLRELQEATDELDLKLRQAEVIKGSWQPVGDLLIDSLQDHLEKVKALRGEIAPLKENVSHVNDLARQLTTLGIQLSPYNLSTLEDLNTRWKLLQVAVEDRVRQLHEAHRDFGPASQHFLSTSVQGPWERAISPNKVPYYINHETQTTCWDHPKMTELYQSLADLNNVRFSAYRTAMKLRRLQKALCLDLLSLSAACDALDQHNLKQNDQPMDILQIINCLTTIYDRLEQEHNNLVNVPLCVDMCLNWLLNVYDTGRTGRIRVLSFKTGIISLCKAHLEDKYRYLFKQVASSTGFCDQRRLGLLLHDSIQIPRQLGEVASFGGSNIEPSVRSCFQFANNKPEIEAALFLDWMRLEPQSMVWLPVLHRVAAAETAKHQAKCNICKECPIIGFRYRSLKHFNYDICQSCFFSGRVAKGHKMHYPMVEYCTPTTSGEDVRDFAKVLKNKFRTKRYFAKHPRMGYLPVQTVLEGDNMETPASSPQLSHDDTHSRIEHYASRLAEMENSNGSYLNDSISPNESIDDEHLLIQHYCQSLNQDSPLSQPRSPAQILISLESEERGELERILADLEEENRNLQAEYDRLKQQHEHKGLSPLPSPPEMMPTSPQSPRDAELIAEAKLLRQHKGRLEARMQILEDHNKQLESQLHRLRQLLEQPQAEAKVNGTTVSSPSTSLQRSDSSQPMLLRVVGSQTSDSMGEEDLLSPPQDTSTGLEEVMEQLNNSFPSSRGHNVGSLFHMADDLGRAMESLVSVMTDEEGAE

SEQ ID NO: 54 - DNA, 13055 bp, Homo sapiens
actttccccctacaggactcagatctgggaggcaattaccttcggagaaaaacgaataggaaaaactgaagtgttactttttttaaagctgctgaagtttgttggtttctcattgtttttaagcctactggagcaataaagtttgaagaacttttaccaggttttttttatcgctgccttgatatacacttttcaaaatgctttggtgggaagaagtagaggactgttatgaaagagaagatgttcaaaagaaaacattcacaaaatgggtaaatgcacaattttctaagtttgggaagcagcatattgagaacctcttcagtgacctacaggatgggaggcgcctcctagacctcctcgaaggcctgacagggcaaaaactgccaaaagaaaaaggatccacaagagttcatgccctgaacaatgtcaacaaggcactgcgggttttgcagaacaataatgttgatttagtgaatattggaagtactgacatcgtagatggaaatcataaactgactcttggtttgatttggaatataatcctccactggcaggtcaaaaatgtaatgaaaaatatcatggctggattgcaacaaaccaacagtgaaaagattctcctgagctgggtccgacaatcaactcgtaattatccacaggttaatgtaatcaacttcaccaccagctggtctgatggcctggctttgaatgctctcatccatagtcataggccagacctatttgactggaatagtgtggtttgccagcagtcagccacacaacgactggaacatgcattcaacatcgccagatatcaattaggcatagagaaactactcgatcctgaagatgttgataccacctatccagataagaagtccatcttaatgtacatcacatcactcttccaagttttgcctcaacaagtgagcattgaagccatccaggaagtggaaatgttgccaaggccacctaaagtgactaaagaagaacattttcagttacatcatcaaatgcactattctcaacagatcacggtcagtctagcacagggatatgagagaacttcttcccctaagcctcgattcaagagctatgcctacacacaggctgcttatgtcaccacctctgaccctacacggagcccatttccttcacagcatttggaagctcctgaagacaagtcatttggcagttcattgatggagagtgaagtaaacctggaccgttatcaaacagctttagaagaagtattatcgtggcttctttctgctgaggacacattgcaagcacaaggagagatttctaatgatgtggaagtggtgaaagaccagtttcatactcatgaggggtacatgatggatttgacagcccatcagggccgggttggtaatattctacaattgggaagtaagctgattggaacaggaaaattatcagaagatgaagaaactgaagtacaagagcagatgaatctcctaaattcaagatgggaatgcctcagggtagctagcatggaaaaacaaagcaatttacatagagttttaatggatctccagaatcagaaactgaaagagttgaatgactggctaacaaaaacagaagaaagaacaaggaaaatggaggaagagcctcttggacctgatcttgaagacctaaaacgccaagtacaacaacataaggtgcttcaagaagatctagaacaagaacaagtcagggtcaattctctcactcacatggtggtggtagttgatgaatctagtggagatcacgcaactgctgctttggaagaacaacttaaggtattgggagatcgatgggcaaacatctgtagatggacagaagaccgctgggttcttttacaagacatccttctcaaatggcaacgtcttactgaagaacagtgcctttttagtgcatggctttcagaaaaagaagatgcagtgaacaagattcacacaactggctttaaagatcaaaatgaaatgttatcaagtcttcaaaaactggccgttttaaaagcggatctagaaaagaaaaagcaatccatgggcaaactgtattcactcaaacaagatcttctttcaacactgaagaataagtcagtgacccagaagacggaagcatggctggataactttgcccggtgttgggataatttagtccaaaaacttgaaaagagtacagcacagatttcacaggctgtcaccaccactcagccatcactaacacagacaactgtaatggaaacagtaactacggtgaccacaagggaacagatcctggtaaagcatgctcaagaggaacttccaccaccacctccccaaaagaagaggcagattactgtggattctgaaattaggaaaaggttggatgttgatataactgaacttcacagctggattactcgctcagaagctgtgttgcagagtcctgaatttgcaatctttcggaaggaaggcaacttctcagacttaaaagaaaaagtcaatgccatagagcgagaaaaagctgagaagttcagaaaactgcaagatgccagcagatcagctcaggccctggtggaacagatggtgaatgagggtgttaatgcagatagcatcaaacaagcctcagaacaactgaacagccggtggatcgaattctgccagttgctaagtgagagacttaactggctggagtatcagaacaacatcatcgctttctataatcagctacaacaattggagcagatgacaactactgctgaaaactggttgaaaatccaacccaccaccccatcagagccaacagcaattaaaagtcagttaaaaatttgtaaggatgaagtcaaccggctatcagatcttcaacctcaaattgaacgattaaaaattcaaagcatagccctgaaagagaaaggacaaggacccatgttcctggatgcagactttgtggcctttacaaatcattttaagcaagtcttttctgatgtgcaggccagagagaaagagctacagacaatttttgacactttgccaccaatgcgctatcaggagaccatgagtgccatcaggacatgggtccagcagtcagaaaccaaactctccatacctcaacttagtgtcaccgactatgaaatcatggagcagagactcggggaattgcaggctttacaaagttctctgcaagagcaacaaagtggcctatactatctcagcaccactgtgaaagagatgtcgaagaaagcgccctctgaaattagccggaaatatcaatcagaatttgaagaaattgagggacgctggaagaagctctcctcccagctggttgagcattgtcaaaagctagaggagcaaatgaataaactccgaaaaattcagaatcacatacaaaccctgaagaaatggatggctgaagttgatgtttttctgaaggaggaatggcctgcccttggggattcagaaattctaaaaaagcagctgaaacagtgcagacttttagtcagtgatattcagacaattcagcccagtctaaacagtgtcaatgaaggtgggcagaagataaagaatgaagcagagccagagtttgcttcgagacttgagacagaactcaaagaacttaacactcagtgggatcacatgtgccaacaggtctatgccagaaaggaggccttgaagggaggtttggagaaaactgtaagcctccagaaagatctatcagagatgcacgaatggatgacacaagctgaagaagagtatcttgagagagattttgaatataaaactccagatgaattacagaaagcagttgaagagatgaagagagctaaagaagaggcccaacaaaaagaagcgaaagtgaaactccttactgagtctgtaaatagtgtcatagctcaagctccacctgtagcacaagaggccttaaaaaaggaacttgaaactctaaccaccaactaccagtggctctgcactaggctgaatgggaaatgcaagactttggaagaagtttgggcatgttggcatgagttattgtcatacttggagaaagcaaacaagtggctaaatgaagtagaatttaaacttaaaaccactgaaaacattcctggcggagctgaggaaatctctgaggtgctagattcacttgaaaatttgatgcgacattcagaggataacccaaatcagattcgcatattggcacagaccctaacagatggcggagtcatggatgagctaatcaatgaggaacttgagacatttaattctcgttggagggaactacatgaagaggctgtaaggaggcaaaagttgcttgaacagagcatccagtctgcccaggagactgaaaaatccttacacttaatccaggagtccctcacattcattgacaagcagttggcagcttatattgcagacaaggtggacgcagctcaaatgcctcaggaagcccagaaaatccaatctgatttgacaagtcatgagatcagtttagaagaaatgaagaaacataatcaggggaaggaggctgcccaaagagtcctgtctcagattgatgttgcacagaaaaaattacaagatgtctccatgaagtttcgattattccagaaaccagccaattttgagcagcgtctacaagaaagtaagatgattttagatgaagtgaagatgcacttgcctgcattggaaacaaagagtgtggaacaggaagtagtacagtcacagctaaatcattgtgtgaacttgtataaaagtctgagtgaagtgaagtctgaagtggaaatggtgataaagactggacgtcagattgtacagaaaaagcagacggaaaatcccaaagaacttgatgaaagagtaacagctttgaaattgcattataatgagctgggagcaaaggtaacagaaagaaagcaacagttggagaaatgcttgaaattgtcccgtaagatgcgaaaggaaatgaatgtcttgacagaatggctggcagctacagatatggaattgacaaagagatcagcagttgaaggaatgcctagtaatttggattctgaagttgcctggggaaaggctactcaaaaagagattgagaaacagaaggtgcacctgaagagtatcacagaggtaggagaggccttgaaaacagttttgggcaagaaggagacgttggtggaagataaactcagtcttctgaatagtaactggatagctgtcacctcccgagcagaagagtggttaaatcttttgttggaataccagaaacacatggaaacttttgaccagaatgtggaccacatcacaaagtggatcattcaggctgacacacttttggatgaatcagagaaaaagaaaccccagcaaaaagaagacgtgcttaagcgtttaaaggcagaactgaatgacatacgcccaaaggtggactctacacgtgaccaagcagcaaacttgatggcaaaccgcggtgaccactgcaggaaattagtagagccccaaatctcagagctcaaccatcgatttgcagccatttcacacagaattaagactggaaaggcctccattcctttgaaggaattggagcagtttaactcagatatacaaaaattgcttgaaccactggaggctgaaattcagcagggggtgaatctgaaagaggaagacttcaataaagatatgaatgaagacaatgagggtactgtaaaagaattgttgcaaagaggagacaacttacaacaaagaatcacagatgagagaaagcgagaggaaataaagataaaacagcagctgttacagacaaaacataatgctctcaaggatttgaggtctcaaagaagaaaaaaggctctagaaatttctcatcagtggtatcagtacaagaggcaggctgatgatctcctgaaatgcttggatgacattgaaaaaaaattagccagcctacctgagcccagagatgaaaggaaaataaaggaaattgatcgggaattgcagaagaagaaagaggagctgaatgcagtgcgtaggcaagctgagggcttgtctgaggatggggccgcaatggcagtggagccaactcagatccagctcagcaagcgctggcgggaaattgagagcaaatttgctcagtttcgaagactcaactttgcacaaattcacactgtccgtgaagaaacgatgatggtgatgactgaagacatgcctttggaaatttcttatgtgccttctacttatttgactgaaatcactcatgtctcacaagccctattagaagtggaacaacttctcaatgctcctgacctctgtgctaaggactttgaagatctctttaagcaagaggagtctctgaagaatataaaagatagtctacaacaaagctcaggtcggattgacattattcatagcaagaagacagcagcattgcaaagtgcaacgcctgtggaaagggtgaagctacaggaagctctctcccagcttgatttccaatgggaaaaagttaacaaaatgtacaaggaccgacaagggcgatttgacagatctgttgagaaatggcggcgttttcattatgatataaagatatttaatcagtggctaacagaagctgaacagtttctcagaaagacacaaattcctgagaattgggaacatgctaaatacaaatggtatcttaaggaactccaggatggcattgggcagcggcaaactgttgtcagaacattgaatgcaactggggaagaaataattcagcaatcctcaaaaacagatgccagtattctacaggaaaaattgggaagcctgaatctgcggtggcaggaggtctgcaaacagctgtcagacagaaaaaagaggctagaagaacaaaagaatatcttgtcagaatttcaaagagatttaaatgaatttgttttatggttggaggaagcagataacattgctagtatcccacttgaacctggaaaagagcagcaactaaaagaaaagcttgagcaagtcaagttactggtggaagagttgcccctgcgccagggaattctcaaacaattaaatgaaactggaggacccgtgcttgtaagtgctcccataagcccagaagagcaagataaacttgaaaataagctcaagcagacaaatctccagtggataaaggtttccagagctttacctgagaaacaaggagaaattgaagctcaaataaaagaccttgggcagcttgaaaaaaagcttgaagaccttgaagagcagttaaatcatctgctgctgtggttatctcctattaggaatcagttggaaatttataaccaaccaaaccaagaaggaccatttgacgttaaggaaactgaaatagcagttcaagctaaacaaccggatgtggaagagattttgtctaaagggcagcatttgtacaaggaaaaaccagccactcagccagtgaagaggaagttagaagatctgagctctgagtggaaggcggtaaaccgtttacttcaagagctgagggcaaagcagcctgacctagctcctggactgaccactattggagcctctcctactcagactgttactctggtgacacaacctgtggttactaaggaaactgccatctccaaactagaaatgccatcttccttgatgttggaggtacctgctctggcagatttcaaccgggcttggacagaacttaccgactggctttctctgcttgatcaagttataaaatcacagagggtgatggtgggtgaccttgaggatatcaacgagatgatcatcaagcagaaggcaacaatgcaggatttggaacagaggcgtccccagttggaagaactcattaccgctgcccaaaatttgaaaaacaagaccagcaatcaagaggctagaacaatcattacggatcgaattgaaagaattcagaatcagtgggatgaagtacaagaacaccttcagaaccggaggcaacagttgaatgaaatgttaaaggattcaacacaatggctggaagctaaggaagaagctgagcaggtcttaggacaggccagagccaagcttgagtcatggaaggagggtccctatacagtagatgcaatccaaaagaaaatcacagaaaccaagcagttggccaaagacctccgccagtggcagacaaatgtagatgtggcaaatgacttggccctgaaacttctccgggattattctgcagatgataccagaaaagtccacatgataacagagaatatcaatgcctcttggagaagcattcataaaagggtgagtgagcgagaggctgctttggaagaaactcatagattactgcaacagttccccctggacctggaaaagtttcttgcctggcttacagaagctgaaacaactgccaatgtcctacaggatgctacccgtaaggaaaggctcctagaagactccaagggagtaaaagagctgatgaaacaatggcaagacctccaaggtgaaattgaagctcacacagatgtttatcacaacctggatgaaaacagccaaaaaatcctgagatccctggaaggttccgatgatgcagtcctgttacaaagacgtttggataacatgaacttcaagtggagtgaacttcggaaaaagtctctcaacattaggtcccatttggaagccagttctgaccagtggaagcgtctgcacctttctctgcaggaacttctggtgtggctacagctgaaagatgatgaattaagccggcaggcacctattggaggcgactttccagcagttcagaagcagaacgatgtacatagggccttcaagagggaattgaaaactaaagaacctgtaatcatgagtactcttgagactgtacgaatatttctgacagagcagcctttggaaggactagagaaactctaccaggagcccagagagctgcctcctgaggagagagcccagaatgtcactcggcttctacgaaagcaggctgaggaggtcaatactgagtgggaaaaattgaacctgcactccgctgactggcagagaaaaatagatgagacccttgaaagactccgggaacttcaagaggccacggatgagctggacctcaagctgcgccaagctgaggtgatcaagggatcctggcagcccgtgggcgatctcctcattgactctctccaagatcacctcgagaaagtcaaggcacttcgaggagaaattgcgcctctgaaagagaacgtgagccacgtcaatgaccttgctcgccagcttaccactttgggcattcagctctcaccgtataacctcagcactctggaagacctgaacaccagatggaagcttctgcaggtggccgtcgaggaccgagtcaggcagctgcatgaagcccacagggactttggtccagcatctcagcactttctttccacgtctgtccagggtccctgggagagagccatctcgccaaacaaagtgccctactatatcaaccacgagactcaaacaacttgctgggaccatcccaaaatgacagagctctaccagtctttagctgacctgaataatgtcagattctcagcttataggactgccatgaaactccgaagactgcagaaggccctttgcttggatctcttgagcctgtcagctgcatgtgatgccttggaccagcacaacctcaagcaaaatgaccagcccatggatatcctgcagattattaattgtttgaccactatttatgaccgcctggagcaagagcacaacaatttggtcaacgtccctctctgcgtggatatgtgtctgaactggctgctgaatgtttatgatacgggacgaacagggaggatccgtgtcctgtcttttaaaactggcatcatttccctgtgtaaagcacatttggaagacaagtacagataccttttcaagcaagtggcaagttcaacaggattttgtgaccagcgcaggctgggcctccttctgcatgattctatccaaattccaagacagttgggtgaagttgcatcctttgggggcagtaacattgagccaagtgtccggagctgcttccaatttgctaataataagccagagatcgaagcggccctcttcctagactggatgagactggaaccccagtccatggtgtggctgcccgtcctgcacagagtggctgctgcagaaactgccaagcatcaggccaaatgtaacatctgcaaagagtgtccaatcattggattcaggtacaggagtctaaagcactttaattatgacatctgccaaagctgctttttttctggtcgagttgcaaaaggccataaaatgcactatcccatggtggaatattgcactccgactacatcaggagaagatgttcgagactttgccaaggtactaaaaaacaaatttcgaaccaaaaggtattttgcgaagcatccccgaatgggctacctgccagtgcagactgtcttagagggggacaacatggaaacgaatctgcaagcagaatatgaccgtctaaagcagcagcacgaacataaaggcctgtccccactgccgtcccctcctgaaatgatgcccacctctccccagagtccccgggatgctgagctcattgctgaggccaagctactgcgtcaacacaaaggccgcctggaagccaggatgcaaatcctggaagaccacaataaacagctggagtcacagttacacaggctaaggcagctgctggagcaaccccaggcagaggccaaagtgaatggcacaacggtgtcctctccttctacctctctacagaggtccgacagcagtcagcctatgctgctccgagtggttggcagtcaaacttcggactccatgggtgaggaagatcttctcagtcctccccaggacacaagcacagggttagaggaggtgatggagcaactcaacaactccttccctagttcaagaggacacaatgtaggaagtcttttccacatggcagatgatttgggcagagcgatggagtccttagtatcagtcatgacagatgaagaaggagcagaataaatgttttacaactcctgattcccgcatggtttttataatattcatacaacaaagaggattagacagtaagagtttacaagaaataaatctatatttttgtgaagggtagtggtattatactgtagatttcagtagtttctaagtctgttattgttttgttaacaatggcaggttttacacgtctatgcaattgtacaaaaaagttataagaaaactacatgtaaaatcttgatagctaaataacttgccatttctttatatggaacgcattttgggttgtttaaaaatttataacagttataaagaaagattgtaaactaaagtgtgctttataaaaaaaagttgtttataaaaacccctaaaaacaaaacaaacacacacacacacacatacacacacacacacaaaactttgaggcagcgcattgttttgcatccttttggcgtgatatccatatgaaattcatggctttttctttttttgcatattaaagataagacttcctctaccaccacaccaaatgactactacacactgctcatttgagaactgtcagctgagtggggcaggcttgagttttcatttcatatatctatatgtctataagtatataaatactatagttatatagataaagagatacgaatttctatagactgactttttccattttttaaatgttcatgtcacatcctaatagaaagaaattacttctagtcagtcatccaggcttacctgcttggtctagaatggatttttcccggagccggaagccaggaggaaactacaccacactaaaacattgtctacagctccagatgtttctcattttaaacaactttccactgacaacgaaagtaaagtaaagtattggatttttttaaagggaacatgtgaatgaatacacaggacttattatatcagagtgagtaatcggttggttggttgattgattgattgattgatacattcagcttcctgctgctagcaatgccacgatttagatttaatgatgcttcagtggaaatcaatcagaaggtattctgaccttgtgaacatcagaaggtattttttaactcccaagcagtagcaggacgatgatagggctggagggctatggattcccagcccatccctgtgaaggagtaggccactctttaagtgaaggattggatgattgttcataatacataaagttctctgtaattacaactaaattattatgccctcttctcacagtcaaaaggaactgggtggtttggtttttgttgcttttttagatttattgtcccatgtgggatgagtttttaaatgccacaagacataatttaaaataaataaactttgggaaaaggtgtaaaacagtagccccatcacatttgtgatactgacaggtatcaacccagaagcccatgaactgtgtttccatcctttgcatttctctgcgagtagttccacacaggtttgtaagtaagtaagaaagaaggcaaattgattcaaatgttacaaaaaaacccttcttggtggattagacaggttaaatatataaacaaacaaacaaaaattgctcaaaaaagaggagaaaagctcaagaggaaaagctaaggactggtaggaaaaagctttactctttcatgccattttatttctttttgatttttaaatcattcattcaatagataccaccgtgtgacctataattttgcaaatctgttacctctgacatcaagtgtaattagcttttggagagtgggctgacatcaagtgtaattagcttttggagagtgggttttgtccattattaataattaattaattaacatcaaacacggcttctcatgctatttctacctcactttggttttggggtgttcctgataattgtgcacacctgagttcacagcttcaccacttgtccattgcgttattttctttttcctttataattctttctttttccttcataattttcaaaagaaaacccaaagctctaaggtaacaaattaccaaattacatgaagatttggtttttgtcttgcatttttttcctttatgtgacgctggaccttttcttta

SEQ ID NO: 55 - protein, 3593 aa, Homo sapiens
MLWWEEVEDCYEREDVQKKTFTKWVNAQFSKFGKQHIENLFSDLQDGRRLLDLLEGLTGQKLPKEKGSTRVHALNNVNKALRVLQNNNVDLVNIGSTDIVDGNHKLTLGLIWNIILHWQVKNVMKNIMAGLQQTNSEKILLSWVRQSTRNYPQVNVINFTTSWSDGLALNALIHSHRPDLFDWNSVVCQQSATQRLEHAFNIARYQLGIEKLLDPEDVDTTYPDKKSILMYITSLFQVLPQQVSIEAIQEVEMLPRPPKVTKEEHFQLHHQMHYSQQITVSLAQGYERTSSPKPRFKSYAYTQAAYVTTSDPTRSPFPSQHLEAPEDKSFGSSLMESEVNLDRYQTALEEVLSWLLSAEDTLQAQGEISNDVEVVKDQFHTHEGYMMDLTAHQGRVGNILQLGSKLIGTGKLSEDEETEVQEQMNLLNSRWECLRVASMEKQSNLHRVLMDLQNQKLKELNDWLTKTEERTRKMEEEPLGPDLEDLKRQVQQHKVLQEDLEQEQVRVNSLTHMVVVVDESSGDHATAALEEQLKVLGDRWANICRWTEDRWVLLQDILLKWQRLTEEQCLFSAWLSEKEDAVNKIHTTGFKDQNEMLSSLQKLAVLKADLEKKKQSMGKLYSLKQDLLSTLKNKSVTQKTEAWLDNFARCWDNLVQKLEKSTAQISQAVTTTQPSLTQTTVMETVTTVTTREQILVKHAQEELPPPPPQKKRQITVDSEIRKRLDVDITELHSWITRSEAVLQSPEFAIFRKEGNFSDLKEKVNAIEREKAEKFRKLQDASRSAQALVEQMVNEGVNADSIKQASEQLNSRWIEFCQLLSERLNWLEYQNNIIAFYNQLQQLEQMTTTAENWLKIQPTTPSEPTAIKSQLKICKDEVNRLSDLQPQIERLKIQSIALKEKGQGPMFLDADFVAFTNHFKQVFSDVQAREKELQTIFDTLPPMRYQETMSAIRTWVQQSETKLSIPQLSVTDYEIMEQRLGELQALQSSLQEQQSGLYYLSTTVKEMSKKAPSEISRKYQSEFEEIEGRWKKLSSQLVEHCQKLEEQMNKLRKIQNHIQTLKKWMAEVDVFLKEEWPALGDSEILKKQLKQCRLLVSDIQTIQPSLNSVNEGGQKIKNEAEPEFASRLETELKELNTQWDHMCQQVYARKEALKGGLEKTVSLQKDLSEMHEWMTQAEEEYLERDFEYKTPDELQKAVEEMKRAKEEAQQKEAKVKLLTESVNSVIAQAPPVAQEALKKELETLTTNYQWLCTRLNGKCKTLEEVWACWHELLSYLEKANKWLNEVEFKLKTTENIPGGAEEISEVLDSLENLMRHSEDNPNQIRILAQTLTDGGVMDELINEELETFNSRWRELHEEAVRRQKLLEQSIQSAQETEKSLHLIQESLTFIDKQLAAYIADKVDAAQMPQEAQKIQSDLTSHEISLEEMKKHNQGKEAAQRVLSQIDVAQKKLQDVSMKFRLFQKPANFEQRLQESKMILDEVKMHLPALETKSVEQEVVQSQLNHCVNLYKSLSEVKSEVEMVIKTGRQIVQKKQTENPKELDERVTALKLHYNELGAKVTERKQQLEKCLKLSRKMRKEMNVLTEWLAATDMELTKRSAVEGMPSNLDSEVAWGKATQKEIEKQKVHLKSITEVGEALKTVLGKKETLVEDKLSLLNSNWIAVTSRAEEWLNLLLEYQKHMETFDQNVDHITKWIIQADTLLDESEKKKPQQKEDVLKRLKAELNDIRPKVDSTRDQAANLMANRGDHCRKLVEPQISELNHRFAAISHRIKTGKASIPLKELEQFNSDIQKLLEPLEAEIQQGVNLKEEDFNKDMNEDNEGTVKELLQRGDNLQQRITDERKREEIKIKQQLLQTKHNALKDLRSQRRKKALEISHQWYQYKRQADDLLKCLDDIEKKLASLPEPRDERKIKEIDRELQKKKEELNAVRRQAEGLSEDGAAMAVEPTQIQLSKRWREIESKFAQFRRLNFAQIHTVREETMMVMTEDMPLEISYVPSTYLTEITHVSQALLEVEQLLNAPDLCAKDFEDLFKQEESLKNIKDSLQQSSGRIDIIHSKKTAALQSATPVERVKLQEALSQLDFQWEKVNKMYKDRQGRFDRSVEKWRRFHYDIKIFNQWLTEAEQFLRKTQIPENWEHAKYKWYLKELQDGIGQRQTVVRTLNATGEEIIQQSSKTDASILQEKLGSLNLRWQEVCKQLSDRKKRLEEQKNILSEFQRDLNEFVLWLEEADNIASIPLEPGKEQQLKEKLEQVKLLVEELPLRQGILKQLNETGGPVLVSAPISPEEQDKLENKLKQTNLQWIKVSRALPEKQGEIEAQIKDLGQLEKKLEDLEEQLNHLLLWLSPIRNQLEIYNQPNQEGPFDVKETEIAVQAKQPDVEEILSKGQHLYKEKPATQPVKRKLEDLSSEWKAVNRLLQELRAKQPDLAPGLTTIGASPTQTVTLVTQPVVTKETAISKLEMPSSLMLEVPALADFNRAWTELTDWLSLLDQVIKSQRVMVGDLEDINEMIIKQKATMQDLEQRRPQLEELITAAQNLKNKTSNQEARTIITDRIERIQNQWDEVQEHLQNRRQQLNEMLKDSTQWLEAKEEAEQVLGQARAKLESWKEGPYTVDAIQKKITETKQLAKDLRQWQTNVDVANDLALKLLRDYSADDTRKVHMITENINASWRSIHKRVSEREAALEETHRLLQQFPLDLEKFLAWLTEAETTANVLQDATRKERLLEDSKGVKELMKQWQDLQGEIEAHTDVYHNLDENSQKILRSLEGSDDAVLLQRRLDNMNFKWSELRKKSLNIRSHLEASSDQWKRLHLSLQELLVWLQLKDDELSRQAPIGGDFPAVQKQNDVHRAFKRELKTKEPVIMSTLETVRIFLTEQPLEGLEKLYQEPRELPPEERAQNVTRLLRKQAEEVNTEWEKLNLHSADWQRKIDETLERLRELQEATDELDLKLRQAEVIKGSWQPVGDLLIDSLQDHLEKVKALRGEIAPLKENVSHVNDLARQLTTLGIQLSPYNLSTLEDLNTRWKLLQVAVEDRVRQLHEAHRDFGPASQHFLSTSVQGPWERAISPNKVPYYINHETQTTCWDHPKMTELYQSLADLNNVRFSAYRTAMKLRRLQKALCLDLLSLSAACDALDQHNLKQNDQPMDILQIINCLTTIYDRLEQEHNNLVNVPLCVDMCLNWLLNVYDTGRTGRIRVLSFKTGIISLCKAHLEDKYRYLFKQVASSTGFCDQRRLGLLLHDSIQIPRQLGEVASFGGSNIEPSVRSCFQFANNKPEIEAALFLDWMRLEPQSMVWLPVLHRVAAAETAKHQAKCNICKECPIIGFRYRSLKHFNYDICQSCFFSGRVAKGHKMHYPMVEYCTPTTSGEDVRDFAKVLKNKFRTKRYFAKHPRMGYLPVQTVLEGDNMETNLQAEYDRLKQQHEHKGLSPLPSPPEMMPTSPQSPRDAELIAEAKLLRQHKGRLEARMQILEDHNKQLESQLHRLRQLLEQPQAEAKVNGTTVSSPSTSLQRSDSSQPMLLRVVGSQTSDSMGEEDLLSPPQDTSTGLEEVMEQLNNSFPSSRGHNVGSLFHMADDLGRAMESLVSVMTDEEGAE

SEQ ID NO: 56 - DNA, 11474 bp, Homo sapiens
actttccccctacaggactcagatctgggaggcaattaccttcggagaaaaacgaataggaaaaactgaagtgttactttttttaaagctgctgaagtttgttggtttctcattgtttttaagcctactggagcaataaagtttgaagaacttttaccaggttttttttatcgctgccttgatatacacttttcaaaatgctttggtgggaagaagtagaggactgttatgaaagagaagatgttcaaaagaaaacattcacaaaatgggtaaatgcacaattttctaagtttgggaagcagcatattgagaacctcttcagtgacctacaggatgggaggcgcctcctagacctcctcgaaggcctgacagggcaaaaactgccaaaagaaaaaggatccacaagagttcatgccctgaacaatgtcaacaaggcactgcgggttttgcagaacaataatgttgatttagtgaatattggaagtactgacatcgtagatggaaatcataaactgactcttggtttgatttggaatataatcctccactggcaggtcaaaaatgtaatgaaaaatatcatggctggattgcaacaaaccaacagtgaaaagattctcctgagctgggtccgacaatcaactcgtaattatccacaggttaatgtaatcaacttcaccaccagctggtctgatggcctggctttgaatgctctcatccatagtcataggccagacctatttgactggaatagtgtggtttgccagcagtcagccacacaacgactggaacatgcattcaacatcgccagatatcaattaggcatagagaaactactcgatcctgaagatgttgataccacctatccagataagaagtccatcttaatgtacatcacatcactcttccaagttttgcctcaacaagtgagcattgaagccatccaggaagtggaaatgttgccaaggccacctaaagtgactaaagaagaacattttcagttacatcatcaaatgcactattctcaacagatcacggtcagtctagcacagggatatgagagaacttcttcccctaagcctcgattcaagagctatgcctacacacaggctgcttatgtcaccacctctgaccctacacggagcccatttccttcacagcatttggaagctcctgaagacaagtcatttggcagttcattgatggagagtgaagtaaacctggaccgttatcaaacagctttagaagaagtattatcgtggcttctttctgctgaggacacattgcaagcacaaggagagatttctaatgatgtggaagtggtgaaagaccagtttcatactcatgaggggtacatgatggatttgacagcccatcagggccgggttggtaatattctacaattgggaagtaagctgattggaacaggaaaattatcagaagatgaagaaactgaagtacaagagcagatgaatctcctaaattcaagatgggaatgcctcagggtagctagcatggaaaaacaaagcaatttacatagagttttaatggatctccagaatcagaaactgaaagagttgaatgactggctaacaaaaacagaagaaagaacaaggaaaatggaggaagagcctcttggacctgatcttgaagacctaaaacgccaagtacaacaacataaggtgcttcaagaagatctagaacaagaacaagtcagggtcaattctctcactcacatggtggtggtagttgatgaatctagtggagatcacgcaactgctgctttggaagaacaacttaaggtattgggagatcgatgggcaaacatctgtagatggacagaagaccgctgggttcttttacaagacatccttctcaaatggcaacgtcttactgaagaacagtgcctttttagtgcatggctttcagaaaaagaagatgcagtgaacaagattcacacaactggctttaaagatcaaaatgaaatgttatcaagtcttcaaaaactggccgttttaaaagcggatctagaaaagaaaaagcaatccatgggcaaactgtattcactcaaacaagatcttctttcaacactgaagaataagtcagtgacccagaagacggaagcatggctggataactttgcccggtgttgggataatttagtccaaaaacttgaaaagagtacagcacagatttcacaggctgtcaccaccactcagccatcactaacacagacaactgtaatggaaacagtaactacggtgaccacaagggaacagatcctggtaaagcatgctcaagaggaacttccaccaccacctccccaaaagaagaggcagattactgtggattctgaaattaggaaaaggttggatgttgatataactgaacttcacagctggattactcgctcagaagctgtgttgcagagtcctgaatttgcaatctttcggaaggaaggcaacttctcagacttaaaagaaaaagtcaatgccatagagcgagaaaaagctgagaagttcagaaaactgcaagatgccagcagatcagctcaggccctggtggaacagatggtgaatgagggtgttaatgcagatagcatcaaacaagcctcagaacaactgaacagccggtggatcgaattctgccagttgctaagtgagagacttaactggctggagtatcagaacaacatcatcgctttctataatcagctacaacaattggagcagatgacaactactgctgaaaactggttgaaaatccaacccaccaccccatcagagccaacagcaattaaaagtcagttaaaaatttgtaaggatgaagtcaaccggctatcagatcttcaacctcaaattgaacgattaaaaattcaaagcatagccctgaaagagaaaggacaaggacccatgttcctggatgcagactttgtggcctttacaaatcattttaagcaagtcttttctgatgtgcaggccagagagaaagagctacagacaatttttgacactttgccaccaatgcgctatcaggagaccatgagtgccatcaggacatgggtccagcagtcagaaaccaaactctccatacctcaacttagtgtcaccgactatgaaatcatggagcagagactcggggaattgcaggctttacaaagttctctgcaagagcaacaaagtggcctatactatctcagcaccactgtgaaagagatgtcgaagaaagcgccctctgaaattagccggaaatatcaatcagaatttgaagaaattgagggacgctggaagaagctctcctcccagctggttgagcattgtcaaaagctagaggagcaaatgaataaactccgaaaaattcagaatcacatacaaaccctgaagaaatggatggctgaagttgatgtttttctgaaggaggaatggcctgcccttggggattcagaaattctaaaaaagcagctgaaacagtgcagacttttagtcagtgatattcagacaattcagcccagtctaaacagtgtcaatgaaggtgggcagaagataaagaatgaagcagagccagagtttgcttcgagacttgagacagaactcaaagaacttaacactcagtgggatcacatgtgccaacaggtctatgccagaaaggaggccttgaagggaggtttggagaaaactgtaagcctccagaaagatctatcagagatgcacgaatggatgacacaagctgaagaagagtatcttgagagagattttgaatataaaactccagatgaattacagaaagcagttgaagagatgaagagagctaaagaagaggcccaacaaaaagaagcgaaagtgaaactccttactgagtctgtaaatagtgtcatagctcaagctccacctgtagcacaagaggccttaaaaaaggaacttgaaactctaaccaccaactaccagtggctctgcactaggctgaatgggaaatgcaagactttggaagaagtttgggcatgttggcatgagttattgtcatacttggagaaagcaaacaagtggctaaatgaagtagaatttaaacttaaaaccactgaaaacattcctggcggagctgaggaaatctctgaggtgctagattcacttgaaaatttgatgcgacattcagaggataacccaaatcagattcgcatattggcacagaccctaacagatggcggagtcatggatgagctaatcaatgaggaacttgagacatttaattctcgttggagggaactacatgaagaggctgtaaggaggcaaaagttgcttgaacagagcatccagtctgcccaggagactgaaaaatccttacacttaatccaggagtccctcacattcattgacaagcagttggcagcttatattgcagacaaggtggacgcagctcaaatgcctcaggaagcccagaaaatccaatctgatttgacaagtcatgagatcagtttagaagaaatgaagaaacataatcaggggaaggaggctgcccaaagagtcctgtctcagattgatgttgcacagaaaaaattacaagatgtctccatgaagtttcgattattccagaaaccagccaattttgagcagcgtctacaagaaagtaagatgattttagatgaagtgaagatgcacttgcctgcattggaaacaaagagtgtggaacaggaagtagtacagtcacagctaaatcattgtgtgaacttgtataaaagtctgagtgaagtgaagtctgaagtggaaatggtgataaagactggacgtcagattgtacagaaaaagcagacggaaaatcccaaagaacttgatgaaagagtaacagctttgaaattgcattataatgagctgggagcaaaggtaacagaaagaaagcaacagttggagaaatgcttgaaattgtcccgtaagatgcgaaaggaaatgaatgtcttgacagaatggctggcagctacagatatggaattgacaaagagatcagcagttgaaggaatgcctagtaatttggattctgaagttgcctggggaaaggctactcaaaaagagattgagaaacagaaggtgcacctgaagagtatcacagaggtaggagaggccttgaaaacagttttgggcaagaaggagacgttggtggaagataaactcagtcttctgaatagtaactggatagctgtcacctcccgagcagaagagtggttaaatcttttgttggaataccagaaacacatggaaacttttgaccagaatgtggaccacatcacaaagtggatcattcaggctgacacacttttggatgaatcagagaaaaagaaaccccagcaaaaagaagacgtgcttaagcgtttaaaggcagaactgaatgacatacgcccaaaggtggactctacacgtgaccaagcagcaaacttgatggcaaaccgcggtgaccactgcaggaaattagtagagccccaaatctcagagctcaaccatcgatttgcagccatttcacacagaattaagactggaaaggcctccattcctttgaaggaattggagcagtttaactcagatatacaaaaattgcttgaaccactggaggctgaaattcagcagggggtgaatctgaaagaggaagacttcaataaagatatgaatgaagacaatgagggtactgtaaaagaattgttgcaaagaggagacaacttacaacaaagaatcacagatgagagaaagcgagaggaaataaagataaaacagcagctgttacagacaaaacataatgctctcaaggatttgaggtctcaaagaagaaaaaaggctctagaaatttctcatcagtggtatcagtacaagaggcaggctgatgatctcctgaaatgcttggatgacattgaaaaaaaattagccagcctacctgagcccagagatgaaaggaaaataaaggaaattgatcgggaattgcagaagaagaaagaggagctgaatgcagtgcgtaggcaagctgagggcttgtctgaggatggggccgcaatggcagtggagccaactcagatccagctcagcaagcgctggcgggaaattgagagcaaatttgctcagtttcgaagactcaactttgcacaaattcacactgtccgtgaagaaacgatgatggtgatgactgaagacatgcctttggaaatttcttatgtgccttctacttatttgactgaaatcactcatgtctcacaagccctattagaagtggaacaacttctcaatgctcctgacctctgtgctaaggactttgaagatctctttaagcaagaggagtctctgaagaatataaaagatagtctacaacaaagctcaggtcggattgacattattcatagcaagaagacagcagcattgcaaagtgcaacgcctgtggaaagggtgaagctacaggaagctctctcccagcttgatttccaatgggaaaaagttaacaaaatgtacaaggaccgacaagggcgatttgacagatctgttgagaaatggcggcgttttcattatgatataaagatatttaatcagtggctaacagaagctgaacagtttctcagaaagacacaaattcctgagaattgggaacatgctaaatacaaatggtatcttaaggaactccaggatggcattgggcagcggcaaactgttgtcagaacattgaatgcaactggggaagaaataattcagcaatcctcaaaaacagatgccagtattctacaggaaaaattgggaagcctgaatctgcggtggcaggaggtctgcaaacagctgtcagacagaaaaaagaggctagaagaacaaaagaatatcttgtcagaatttcaaagagatttaaatgaatttgttttatggttggaggaagcagataacattgctagtatcccacttgaacctggaaaagagcagcaactaaaagaaaagcttgagcaagtcaagttactggtggaagagttgcccctgcgccagggaattctcaaacaattaaatgaaactggaggacccgtgcttgtaagtgctcccataagcccagaagagcaagataaacttgaaaataagctcaagcagacaaatctccagtggataaaggtttccagagctttacctgagaaacaaggagaaattgaagctcaaataaaagaccttgggcagcttgaaaaaaagcttgaagaccttgaagagcagttaaatcatctgctgctgtggttatctcctattaggaatcagttggaaatttataaccaaccaaaccaagaaggaccatttgacgttaaggaaactgaaatagcagttcaagctaaacaaccggatgtggaagagattttgtctaaagggcagcatttgtacaaggaaaaaccagccactcagccagtgaagaggaagttagaagatctgagctctgagtggaaggcggtaaaccgtttacttcaagagctgagggcaaagcagcctgacctagctcctggactgaccactattggagcctctcctactcagactgttactctggtgacacaacctgtggttactaaggaaactgccatctccaaactagaaatgccatcttccttgatgttggaggtacctgctctggcagatttcaaccgggcttggacagaacttaccgactggctttctctgcttgatcaagttataaaatcacagagggtgatggtgggtgaccttgaggatatcaacgagatgatcatcaagcagaaggcaacaatgcaggatttggaacagaggcgtccccagttggaagaactcattaccgctgcccaaaatttgaaaaacaagaccagcaatcaagaggctagaacaatcattacggatcgaattgaaagaattcagaatcagtgggatgaagtacaagaacaccttcagaaccggaggcaacagttgaatgaaatgttaaaggattcaacacaatggctggaagctaaggaagaagctgagcaggtcttaggacaggccagagccaagcttgagtcatggaaggagggtccctatacagtagatgcaatccaaaagaaaatcacagaaaccaagcagttggccaaagacctccgccagtggcagacaaatgtagatgtggcaaatgacttggccctgaaacttctccgggattattctgcagatgataccagaaaagtccacatgataacagagaatatcaatgcctcttggagaagcattcataaaagggtgagtgagcgagaggctgctttggaagaaactcatagattactgcaacagttccccctggacctggaaaagtttcttgcctggcttacagaagctgaaacaactgccaatgtcctacaggatgctacccgtaaggaaaggctcctagaagactccaagggagtaaaagagctgatgaaacaatggcaagacctccaaggtgaaattgaagctcacacagatgtttatcacaacctggatgaaaacagccaaaaaatcctgagatccctggaaggttccgatgatgcagtcctgttacaaagacgtttggataacatgaacttcaagtggagtgaacttcggaaaaagtctctcaacattaggtcccatttggaagccagttctgaccagtggaagcgtctgcacctttctctgcaggaacttctggtgtggctacagctgaaagatgatgaattaagccggcaggcacctattggaggcgactttccagcagttcagaagcagaacgatgtacatagggccttcaagagggaattgaaaactaaagaacctgtaatcatgagtactcttgagactgtacgaatatttctgacagagcagcctttggaaggactagagaaactctaccaggagcccagagagctgcctcctgaggagagagcccagaatgtcactcggcttctacgaaagcaggctgaggaggtcaatactgagtgggaaaaattgaacctgcactccgctgactggcagagaaaaatagatgagacccttgaaagactccgggaacttcaagaggccacggatgagctggacctcaagctgcgccaagctgaggtgatcaagggatcctggcagcccgtgggcgatctcctcattgactctctccaagatcacctcgagaaagtcaaggcacttcgaggagaaattgcgcctctgaaagagaacgtgagccacgtcaatgaccttgctcgccagcttaccactttgggcattcagctctcaccgtataacctcagcactctggaagacctgaacaccagatggaagcttctgcaggtggccgtcgaggaccgagtcaggcagctgcatgaagcccacagggactttggtccagcatctcagcactttctttccacgtctgtccagggtccctgggagagagccatctcgccaaacaaagtgccctactatatcaaccacgagactcaaacaacttgctgggaccatcccaaaatgacagagctctaccagtctttagctgacctgaataatgtcagattctcagcttataggactgccatgaaactccgaagactgcagaaggccctttgcttggatctcttgagcctgtcagctgcatgtgatgccttggaccagcacaacctcaagcaaaatgaccagcccatggatatcctgcagattattaattgtttgaccactatttatgaccgcctggagcaagagcacaacaatttggtcaacgtccctctctgcgtggatatgtgtctgaactggctgctgaatgtttatgatacgggacgaacagggaggatccgtgtcctgtcttttaaaactggcatcatttccctgtgtaaagcacatttggaagacaagtacagataccttttcaagcaagtggcaagttcaacaggattttgtgaccagcgcaggctgggcctccttctgcatgattctatccaaattccaagacagttgggtgaagttgcatcctttgggggcagtaacattgagccaagtgtccggagctgcttccaattttcccaatctctggaaaccacagctctgttttctgttcctgtaattttgccttttcctgaactggattttaaaggattgtaggaggcagtagtggaagagctaactttatatcttgttcttttacataatgcgccctgatccacacttgggaaagtatattccatggtacctatagacagatatatgtgctttaccatgtatatgtgaaacttttctaatttaactttcctgttaaattagaactcggtagcataaattaatactgttgagtatacttagggatttgcatagatttaaaattgtgcatatgttccctagggccatggcgttaattggtttattagtcaggtggagtgcagagcctgaggtcaggacagttgtccttgaacatggaaatgaagagtggataatcaccatgtgttattgtttgggctgattttatctttaatgggtgattcagagtcctgattaatatttagagcagtgactgctggcctcctacctgctcattatcttcagaactttaaataaaatacttgatttctacccaagatggtagttatgggaagccttttacttcttcttgtctcacaaagacaactcttgacctctcaatccttaaacaaaaagttctgcttctgcgcatgtggggactcttaaactcattttcatgcctggagattcacatttagggatctaggaaaagcacatctaggcagagtcgatgaggagatgctttaagaaccgtgacaaggacaggaaggaaatcaattttgcgttaggtttgtatttttagagaaaacgaatcctggggaacttttcacactcattactattgacattaataccattgtcctgtccctttcacagttactaaaatcactcttgcccaccctcctgccttgcccacaacctattcccatgaaggggtgacttgggagaaataacggtttccaaccaacgttttattttggaaacatttcaagcacaaagagtagttgaaaggatagtctaaagaacactcatctgtgtcatacatctgttcaatccatggttgcttttcgctctacttacctcctccaccctctcagctctgtttatgtatgtgtctgtctgtgtacatacacacacaaacacattttcccctatgccatttaaaagtaaaggagcatcacaacataaacccctaaacacttcaccatacaccattttcttaaaggatgacattctctaacataactgcaatgctatcgttacacacaaatttaacagcaatccagcaataccctctgatatgcagtccacactgaactttccccagtgccccagaattgttccttatagccactgttttcttccagcatctagtcaaggtttttgtctgtcatgtctctgtaccttcatttagttttgaacagtctcccagcattttgttttcctttcatgacattgacttttttggtaggggga

SEQ ID NO: 57 - protein, 3295 aa, Homo sapiens
MLWWEEVEDCYEREDVQKKTFTKWVNAQFSKFGKQHIENLFSDLQDGRRLLDLLEGLTGQKLPKEKGSTRVHALNNVNKALRVLQNNNVDLVNIGSTDIVDGNHKLTLGLIWNIILHWQVKNVMKNIMAGLQQTNSEKILLSWVRQSTRNYPQVNVINFTTSWSDGLALNALIHSHRPDLFDWNSVVCQQSATQRLEHAFNIARYQLGIEKLLDPEDVDTTYPDKKSILMYITSLFQVLPQQVSIEAIQEVEMLPRPPKVTKEEHFQLHHQMHYSQQITVSLAQGYERTSSPKPRFKSYAYTQAAYVTTSDPTRSPFPSQHLEAPEDKSFGSSLMESEVNLDRYQTALEEVLSWLLSAEDTLQAQGEISNDVEVVKDQFHTHEGYMMDLTAHQGRVGNILQLGSKLIGTGKLSEDEETEVQEQMNLLNSRWECLRVASMEKQSNLHRVLMDLQNQKLKELNDWLTKTEERTRKMEEEPLGPDLEDLKRQVQQHKVLQEDLEQEQVRVNSLTHMVVVVDESSGDHATAALEEQLKVLGDRWANICRWTEDRWVLLQDILLKWQRLTEEQCLFSAWLSEKEDAVNKIHTTGFKDQNEMLSSLQKLAVLKADLEKKKQSMGKLYSLKQDLLSTLKNKSVTQKTEAWLDNFARCWDNLVQKLEKSTAQISQAVTTTQPSLTQTTVMETVTTVTTREQILVKHAQEELPPPPPQKKRQITVDSEIRKRLDVDITELHSWITRSEAVLQSPEFAIFRKEGNFSDLKEKVNAIEREKAEKFRKLQDASRSAQALVEQMVNEGVNADSIKQASEQLNSRWIEFCQLLSERLNWLEYQNNIIAFYNQLQQLEQMTTTAENWLKIQPTTPSEPTAIKSQLKICKDEVNRLSDLQPQIERLKIQSIALKEKGQGPMFLDADFVAFTNHFKQVFSDVQAREKELQTIFDTLPPMRYQETMSAIRTWVQQSETKLSIPQLSVTDYEIMEQRLGELQALQSSLQEQQSGLYYLSTTVKEMSKKAPSEISRKYQSEFEEIEGRWKKLSSQLVEHCQKLEEQMNKLRKIQNHIQTLKKWMAEVDVFLKEEWPALGDSEILKKQLKQCRLLVSDIQTIQPSLNSVNEGGQKIKNEAEPEFASRLETELKELNTQWDHMCQQVYARKEALKGGLEKTVSLQKDLSEMHEWMTQAEEEYLERDFEYKTPDELQKAVEEMKRAKEEAQQKEAKVKLLTESVNSVIAQAPPVAQEALKKELETLTTNYQWLCTRLNGKCKTLEEVWACWHELLSYLEKANKWLNEVEFKLKTTENIPGGAEEISEVLDSLENLMRHSEDNPNQIRILAQTLTDGGVMDELINEELETFNSRWRELHEEAVRRQKLLEQSIQSAQETEKSLHLIQESLTFIDKQLAAYIADKVDAAQMPQEAQKIQSDLTSHEISLEEMKKHNQGKEAAQRVLSQIDVAQKKLQDVSMKFRLFQKPANFEQRLQESKMILDEVKMHLPALETKSVEQEVVQSQLNHCVNLYKSLSEVKSEVEMVIKTGRQIVQKKQTENPKELDERVTALKLHYNELGAKVTERKQQLEKCLKLSRKMRKEMNVLTEWLAATDMELTKRSAVEGMPSNLDSEVAWGKATQKEIEKQKVHLKSITEVGEALKTVLGKKETLVEDKLSLLNSNWIAVTSRAEEWLNLLLEYQKHMETFDQNVDHITKWIIQADTLLDESEKKKPQQKEDVLKRLKAELNDIRPKVDSTRDQAANLMANRGDHCRKLVEPQISELNHRFAAISHRIKTGKASIPLKELEQFNSDIQKLLEPLEAEIQQGVNLKEEDFNKDMNEDNEGTVKELLQRGDNLQQRITDERKREEIKIKQQLLQTKHNALKDLRSQRRKKALEISHQWYQYKRQADDLLKCLDDIEKKLASLPEPRDERKIKEIDRELQKKKEELNAVRRQAEGLSEDGAAMAVEPTQIQLSKRWREIESKFAQFRRLNFAQIHTVREETMMVMTEDMPLEISYVPSTYLTEITHVSQALLEVEQLLNAPDLCAKDFEDLFKQEESLKNIKDSLQQSSGRIDIIHSKKTAALQSATPVERVKLQEALSQLDFQWEKVNKMYKDRQGRFDRSVEKWRRFHYDIKIFNQWLTEAEQFLRKTQIPENWEHAKYKWYLKELQDGIGQRQTVVRTLNATGEEIIQQSSKTDASILQEKLGSLNLRWQEVCKQLSDRKKRLEEQKNILSEFQRDLNEFVLWLEEADNIASIPLEPGKEQQLKEKLEQVKLLVEELPLRQGILKQLNETGGPVLVSAPISPEEQDKLENKLKQTNLQWIKVSRALPEKQGEIEAQIKDLGQLEKKLEDLEEQLNHLLLWLSPIRNQLEIYNQPNQEGPFDVKETEIAVQAKQPDVEEILSKGQHLYKEKPATQPVKRKLEDLSSEWKAVNRLLQELRAKQPDLAPGLTTIGASPTQTVTLVTQPVVTKETAISKLEMPSSLMLEVPALADFNRAWTELTDWLSLLDQVIKSQRVMVGDLEDINEMIIKQKATMQDLEQRRPQLEELITAAQNLKNKTSNQEARTIITDRIERIQNQWDEVQEHLQNRRQQLNEMLKDSTQWLEAKEEAEQVLGQARAKLESWKEGPYTVDAIQKKITETKQLAKDLRQWQTNVDVANDLALKLLRDYSADDTRKVHMITENINASWRSIHKRVSEREAALEETHRLLQQFPLDLEKFLAWLTEAETTANVLQDATRKERLLEDSKGVKELMKQWQDLQGEIEAHTDVYHNLDENSQKILRSLEGSDDAVLLQRRLDNMNFKWSELRKKSLNIRSHLEASSDQWKRLHLSLQELLVWLQLKDDELSRQAPIGGDFPAVQKQNDVHRAFKRELKTKEPVIMSTLETVRIFLTEQPLEGLEKLYQEPRELPPEERAQNVTRLLRKQAEEVNTEWEKLNLHSADWQRKIDETLERLRELQEATDELDLKLRQAEVIKGSWQPVGDLLIDSLQDHLEKVKALRGEIAPLKENVSHVNDLARQLTTLGIQLSPYNLSTLEDLNTRWKLLQVAVEDRVRQLHEAHRDFGPASQHFLSTSVQGPWERAISPNKVPYYINHETQTTCWDHPKMTELYQSLADLNNVRFSAYRTAMKLRRLQKALCLDLLSLSAACDALDQHNLKQNDQPMDILQIINCLTTIYDRLEQEHNNLVNVPLCVDMCLNWLLNVYDTGRTGRIRVLSFKTGIISLCKAHLEDKYRYLFKQVASSTGFCDQRRLGLLLHDSIQIPRQLGEVASFGGSNIEPSVRSCFQFSQSLETTALFSVPVILPFPELDFKGL

SEQ ID NO: 58 - DNA, 10795 bp, Homo sapiens
actttccccctacaggactcagatctgggaggcaattaccttcggagaaaaacgaataggaaaaactgaagtgttactttttttaaagctgctgaagtttgttggtttctcattgtttttaagcctactggagcaataaagtttgaagaacttttaccaggttttttttatcgctgccttgatatacacttttcaaaatgctttggtgggaagaagtagaggactgttatgaaagagaagatgttcaaaagaaaacattcacaaaatgggtaaatgcacaattttctaagtttgggaagcagcatattgagaacctcttcagtgacctacaggatgggaggcgcctcctagacctcctcgaaggcctgacagggcaaaaactgccaaaagaaaaaggatccacaagagttcatgccctgaacaatgtcaacaaggcactgcgggttttgcagaacaataatgttgatttagtgaatattggaagtactgacatcgtagatggaaatcataaactgactcttggtttgatttggaatataatcctccactggcaggtcaaaaatgtaatgaaaaatatcatggctggattgcaacaaaccaacagtgaaaagattctcctgagctgggtccgacaatcaactcgtaattatccacaggttaatgtaatcaacttcaccaccagctggtctgatggcctggctttgaatgctctcatccatagtcataggccagacctatttgactggaatagtgtggtttgccagcagtcagccacacaacgactggaacatgcattcaacatcgccagatatcaattaggcatagagaaactactcgatcctgaagatgttgataccacctatccagataagaagtccatcttaatgtacatcacatcactcttccaagttttgcctcaacaagtgagcattgaagccatccaggaagtggaaatgttgccaaggccacctaaagtgactaaagaagaacattttcagttacatcatcaaatgcactattctcaacagatcacggtcagtctagcacagggatatgagagaacttcttcccctaagcctcgattcaagagctatgcctacacacaggctgcttatgtcaccacctctgaccctacacggagcccatttccttcacagcatttggaagctcctgaagacaagtcatttggcagttcattgatggagagtgaagtaaacctggaccgttatcaaacagctttagaagaagtattatcgtggcttctttctgctgaggacacattgcaagcacaaggagagatttctaatgatgtggaagtggtgaaagaccagtttcatactcatgaggggtacatgatggatttgacagcccatcagggccgggttggtaatattctacaattgggaagtaagctgattggaacaggaaaattatcagaagatgaagaaactgaagtacaagagcagatgaatctcctaaattcaagatgggaatgcctcagggtagctagcatggaaaaacaaagcaatttacatagagttttaatggatctccagaatcagaaactgaaagagttgaatgactggctaacaaaaacagaagaaagaacaaggaaaatggaggaagagcctcttggacctgatcttgaagacctaaaacgccaagtacaacaacataaggtgcttcaagaagatctagaacaagaacaagtcagggtcaattctctcactcacatggtggtggtagttgatgaatctagtggagatcacgcaactgctgctttggaagaacaacttaaggtattgggagatcgatgggcaaacatctgtagatggacagaagaccgctgggttcttttacaagacatccttctcaaatggcaacgtcttactgaagaacagtgcctttttagtgcatggctttcagaaaaagaagatgcagtgaacaagattcacacaactggctttaaagatcaaaatgaaatgttatcaagtcttcaaaaactggccgttttaaaagcggatctagaaaagaaaaagcaatccatgggcaaactgtattcactcaaacaagatcttctttcaacactgaagaataagtcagtgacccagaagacggaagcatggctggataactttgcccggtgttgggataatttagtccaaaaacttgaaaagagtacagcacagatttcacaggctgtcaccaccactcagccatcactaacacagacaactgtaatggaaacagtaactacggtgaccacaagggaacagatcctggtaaagcatgctcaagaggaacttccaccaccacctccccaaaagaagaggcagattactgtggattctgaaattaggaaaaggttggatgttgatataactgaacttcacagctggattactcgctcagaagctgtgttgcagagtcctgaatttgcaatctttcggaaggaaggcaacttctcagacttaaaagaaaaagtcaatgccatagagcgagaaaaagctgagaagttcagaaaactgcaagatgccagcagatcagctcaggccctggtggaacagatggtgaatgagggtgttaatgcagatagcatcaaacaagcctcagaacaactgaacagccggtggatcgaattctgccagttgctaagtgagagacttaactggctggagtatcagaacaacatcatcgctttctataatcagctacaacaattggagcagatgacaactactgctgaaaactggttgaaaatccaacccaccaccccatcagagccaacagcaattaaaagtcagttaaaaatttgtaaggatgaagtcaaccggctatcagatcttcaacctcaaattgaacgattaaaaattcaaagcatagccctgaaagagaaaggacaaggacccatgttcctggatgcagactttgtggcctttacaaatcattttaagcaagtcttttctgatgtgcaggccagagagaaagagctacagacaatttttgacactttgccaccaatgcgctatcaggagaccatgagtgccatcaggacatgggtccagcagtcagaaaccaaactctccatacctcaacttagtgtcaccgactatgaaatcatggagcagagactcggggaattgcaggctttacaaagttctctgcaagagcaacaaagtggcctatactatctcagcaccactgtgaaagagatgtcgaagaaagcgccctctgaaattagccggaaatatcaatcagaatttgaagaaattgagggacgctggaagaagctctcctcccagctggttgagcattgtcaaaagctagaggagcaaatgaataaactccgaaaaattcagaatcacatacaaaccctgaagaaatggatggctgaagttgatgtttttctgaaggaggaatggcctgcccttggggattcagaaattctaaaaaagcagctgaaacagtgcagacttttagtcagtgatattcagacaattcagcccagtctaaacagtgtcaatgaaggtgggcagaagataaagaatgaagcagagccagagtttgcttcgagacttgagacagaactcaaagaacttaacactcagtgggatcacatgtgccaacaggtctatgccagaaaggaggccttgaagggaggtttggagaaaactgtaagcctccagaaagatctatcagagatgcacgaatggatgacacaagctgaagaagagtatcttgagagagattttgaatataaaactccagatgaattacagaaagcagttgaagagatgaagagagctaaagaagaggcccaacaaaaagaagcgaaagtgaaactccttactgagtctgtaaatagtgtcatagctcaagctccacctgtagcacaagaggccttaaaaaaggaacttgaaactctaaccaccaactaccagtggctctgcactaggctgaatgggaaatgcaagactttggaagaagtttgggcatgttggcatgagttattgtcatacttggagaaagcaaacaagtggctaaatgaagtagaatttaaacttaaaaccactgaaaacattcctggcggagctgaggaaatctctgaggtgctagattcacttgaaaatttgatgcgacattcagaggataacccaaatcagattcgcatattggcacagaccctaacagatggcggagtcatggatgagctaatcaatgaggaacttgagacatttaattctcgttggagggaactacatgaagaggctgtaaggaggcaaaagttgcttgaacagagcatccagtctgcccaggagactgaaaaatccttacacttaatccaggagtccctcacattcattgacaagcagttggcagcttatattgcagacaaggtggacgcagctcaaatgcctcaggaagcccagaaaatccaatctgatttgacaagtcatgagatcagtttagaagaaatgaagaaacataatcaggggaaggaggctgcccaaagagtcctgtctcagattgatgttgcacagaaaaaattacaagatgtctccatgaagtttcgattattccagaaaccagccaattttgagcagcgtctacaagaaagtaagatgattttagatgaagtgaagatgcacttgcctgcattggaaacaaagagtgtggaacaggaagtagtacagtcacagctaaatcattgtgtgaacttgtataaaagtctgagtgaagtgaagtctgaagtggaaatggtgataaagactggacgtcagattgtacagaaaaagcagacggaaaatcccaaagaacttgatgaaagagtaacagctttgaaattgcattataatgagctgggagcaaaggtaacagaaagaaagcaacagttggagaaatgcttgaaattgtcccgtaagatgcgaaaggaaatgaatgtcttgacagaatggctggcagctacagatatggaattgacaaagagatcagcagttgaaggaatgcctagtaatttggattctgaagttgcctggggaaaggctactcaaaaagagattgagaaacagaaggtgcacctgaagagtatcacagaggtaggagaggccttgaaaacagttttgggcaagaaggagacgttggtggaagataaactcagtcttctgaatagtaactggatagctgtcacctcccgagcagaagagtggttaaatcttttgttggaataccagaaacacatggaaacttttgaccagaatgtggaccacatcacaaagtggatcattcaggctgacacacttttggatgaatcagagaaaaagaaaccccagcaaaaagaagacgtgcttaagcgtttaaaggcagaactgaatgacatacgcccaaaggtggactctacacgtgaccaagcagcaaacttgatggcaaaccgcggtgaccactgcaggaaattagtagagccccaaatctcagagctcaaccatcgatttgcagccatttcacacagaattaagactggaaaggcctccattcctttgaaggaattggagcagtttaactcagatatacaaaaattgcttgaaccactggaggctgaaattcagcagggggtgaatctgaaagaggaagacttcaataaagatatgaatgaagacaatgagggtactgtaaaagaattgttgcaaagaggagacaacttacaacaaagaatcacagatgagagaaagcgagaggaaataaagataaaacagcagctgttacagacaaaacataatgctctcaaggatttgaggtctcaaagaagaaaaaaggctctagaaatttctcatcagtggtatcagtacaagaggcaggctgatgatctcctgaaatgcttggatgacattgaaaaaaaattagccagcctacctgagcccagagatgaaaggaaaataaaggaaattgatcgggaattgcagaagaagaaagaggagctgaatgcagtgcgtaggcaagctgagggcttgtctgaggatggggccgcaatggcagtggagccaactcagatccagctcagcaagcgctggcgggaaattgagagcaaatttgctcagtttcgaagactcaactttgcacaaattcacactgtccgtgaagaaacgatgatggtgatgactgaagacatgcctttggaaatttcttatgtgccttctacttatttgactgaaatcactcatgtctcacaagccctattagaagtggaacaacttctcaatgctcctgacctctgtgctaaggactttgaagatctctttaagcaagaggagtctctgaagaatataaaagatagtctacaacaaagctcaggtcggattgacattattcatagcaagaagacagcagcattgcaaagtgcaacgcctgtggaaagggtgaagctacaggaagctctctcccagcttgatttccaatgggaaaaagttaacaaaatgtacaaggaccgacaagggcgatttgacagatctgttgagaaatggcggcgttttcattatgatataaagatatttaatcagtggctaacagaagctgaacagtttctcagaaagacacaaattcctgagaattgggaacatgctaaatacaaatggtatcttaagagaacaggagacagaggacttatccttcttgatgatgtcatttgaaaagaatggctttcaggtccttgagtgagagacacttctgatttccaagagctacatgttcacaattgtaagcccttttgagtaaatgttctaagaaacggaggtaagagtcctatcaacagatgtgtgttggctagaacaaacattaaattttcctggcagcactgagctttctcaagcaggcacttaagggaaggctagggtcatcctagggacatggccttctggggctagaaaccatactagagtttagtcaagtcttagtgcaagggtttggacagagttgttaagtgctgagagttctgtatttctcactgtcacaaaggaagatcagaagctcctgatacttttttcatcagtacaattgaatatataaatcctatacacaaaaataaactaagcttatacaagcatattggtcaaggaatgttgctggccttattaattagatagcccagttaaaagaagaattttttaatataattaatgttaaagtaggatgatagtatataaaacgtgtctactgtcctgaatacaaactaaactgtttggtttagcatttacctcaagatctcttaatatcccccaaagggtccctaaaaccacaacttatctttgtgctcatgaagtagagaagagacagttaatagacatttctagctgatagactgttgtagagcagagaacgctctgtgtttttgaaaattaaacatatgaatttgcccctcttcccctattaaggaagaagagtttcttaattgtgcgaacacatcaagtgaactattcaattagatttttgtgacccagggtataaacatctggttaaggttacatatttcaaaggaacaaaacactagaaactcttggttttaaatctcatggctggaggataatttgcagcagagatttatctggcaagcatacagaattgctgagactgttctaaagatgtaagtgtgggtgtttgtgtcgtgaaaatagctgtttacatctattaagtggataccgatggttgaaagtgccgtctatgtcaagtttttaccaaatcaacttttgcctcactgtgtcagaccattttacctaatcaacttggactgctaatgtcctttcccctggcaccactatctgtctcttttgcaaagcacagaaacggcatgcatgattgtagtttataaaacacatgtaccaatgtggtctacagcttctgttgagttcgagagggtcagtttctgtaatctcttctggcacagagtcaagaacagcttcactttcctcctgctacctctctacccgtaagtgtgaacccatcactttgctaacactcaggaaggggattacacaaaatagagcaggagccctctgacctgaatatgcatctgagccctagccatagagcttctgattcagtagatctgggatggggcctaaatatttgcatttttaagtgtataagtgatgctgatgctgctggttccaggaccacattttaagaaatatcgataaaggtggagaattaaactgcagctcagaagacctgagttcttgccccagcttgacttttacaatctagcaaatggataaaactcgcaggacttcagttctcttcatctacacagtgagtggttagattggctttgtaatttaaaattaaacagggtttgattctgattcactacacaaggttccaaagaaggaatgatatctcctttcatttcttcactttgtcttctgtccctaggtaatcttatctatgttcctgatttaacctaactaatgtttctgcaaagcttctaatatttacatctccagccctgaaactctcatttgaatgctagtcttatatacatacccccctgcctaattgacatctccacttaaatgtatcagaggcaactcagactcaacaaggaccaaactgaatgttcgaccttgtccttcaaacccgatacacatccaggttcctccatcccagtgaatgacactatccagttaagcaagccaaaagtctggattttttttcctcactcttcctcactgtccgtcaactaccattattaaatctgtcacctggtcctactgatttaaccttctcaatatctctacagtttttctttatgcccattagtatcctagtgcaagctaccatcgtctctcattggaattaacacagtaacccccctacccaccagactgttctgcctacagatagtgtgatatttaataaatataaatctagccttggctagatttctccttcaaaaggttcacattaattttagccttaaaatggtgtgcaaagctttgcatagtctgtcctttgctatgttggcagtattttttactatccctctcatctgctcattctctgtactccaactacactaactttgtttttttttttttttagatttctctaactacagtgctgtaatctctttttcctttgcacgtactattccgtttgtcagggaatctgctcactgtctccacccactccacacactcacgttttcctgcccgtcttaccggtcttgatcggttgtcacttgctcaggaaggtttccctggtcaccccctccacaaattgaattaagtcctcttgctgcatgctgtcctagtgctctttattttcctctcctcatccttaattcagtttgtaattacatgttatttgtgtgaggatttgattattatctgtgtcacccactagatattgggcattctttacttactcaccactgaattcatagaaccacagtaattgtacacaacaaatattcaagagaaatttattgaattgatgaatgaaaagttgtaccttaacatgttcctgacatgtatccaaaaaagagctcccctttggggtctattaggactttggacctaggtaaacgtaaccctagtttcgctcaggtttaaacagtagaaagtaattgggtctcttttgcatgtggctttcctaagggctaaccctgtcttcggaatgagtcaatacagcagagctgttgaaagcagactctagcttcggacaacgttggtccgaatcatggttccgtcatttcttagctgtgtgatttagaataaattaatgttttaaagctttgatttcctcttccttaatctggagatgctaataaagccaacttcgtagaggtattgcgatgagtaaataagcataatttgctgtaaacaccttgcagattgcctgttgtatgctaactaatcaataaattgaagctcttaacatcattatattagatatttccagcattgagtatactatcaggcatgtggtagaagctcaatataaagttttgttaaattgaatagattccatatatggtatttctacagcattatgctccttatttaagtgtctctaagtattttttaagtatcacctcacaaaagacagatgtttaattcattacacatgtgaattgttttagatagaaaataaaataaaaaattcaaacattgaaatcaatagtgtaccttaccttaggattacaccataaaatttctaccaatcgagaataaagtgtacagtctatttcctttctaatacttttaacgcaacaaatgtttattgaacacttactacttctaatctatgacagacataaagatgaataaagcatgccacaatgtttaaaggagctcactatatcataagaaagcggattcacacagacaactctataagataaagtggtaaatttaggctggcctgtgaaacaaaggattataggtatagttaagaggtggaatttattttacttcgaggatttcagttacctttatattctttgtctaacctttcatgtttctctttcttcagaaacagagcacctttttcctgacacattcatttccccctatggagtagagcagttgttttcaaagtgtgggtcccagatcagcatcacggggatggttagaaatgcccattcttgagcctcacaacagacctactgaaacagaaattcttggagagtggagcccgcagatctgtgatcaagccctgtaggcaattctaacgcacactcaagttaaagaaccacgggaagaaaggtccatcctgtaacaagacagatttttttcattagcatcaa

SEQ ID NO: 59 - protein, 2160 aa, Homo sapiens
MLWWEEVEDCYEREDVQKKTFTKWVNAQFSKFGKQHIENLFSDLQDGRRLLDLLEGLTGQKLPKEKGSTRVHALNNVNKALRVLQNNNVDLVNIGSTDIVDGNHKLTLGLIWNIILHWQVKNVMKNIMAGLQQTNSEKILLSWVRQSTRNYPQVNVINFTTSWSDGLALNALIHSHRPDLFDWNSVVCQQSATQRLEHAFNIARYQLGIEKLLDPEDVDTTYPDKKSILMYITSLFQVLPQQVSIEAIQEVEMLPRPPKVTKEEHFQLHHQMHYSQQITVSLAQGYERTSSPKPRFKSYAYTQAAYVTTSDPTRSPFPSQHLEAPEDKSFGSSLMESEVNLDRYQTALEEVLSWLLSAEDTLQAQGEISNDVEVVKDQFHTHEGYMMDLTAHQGRVGNILQLGSKLIGTGKLSEDEETEVQEQMNLLNSRWECLRVASMEKQSNLHRVLMDLQNQKLKELNDWLTKTEERTRKMEEEPLGPDLEDLKRQVQQHKVLQEDLEQEQVRVNSLTHMVVVVDESSGDHATAALEEQLKVLGDRWANICRWTEDRWVLLQDILLKWQRLTEEQCLFSAWLSEKEDAVNKIHTTGFKDQNEMLSSLQKLAVLKADLEKKKQSMGKLYSLKQDLLSTLKNKSVTQKTEAWLDNFARCWDNLVQKLEKSTAQISQAVTTTQPSLTQTTVMETVTTVTTREQILVKHAQEELPPPPPQKKRQITVDSEIRKRLDVDITELHSWITRSEAVLQSPEFAIFRKEGNFSDLKEKVNAIEREKAEKFRKLQDASRSAQALVEQMVNEGVNADSIKQASEQLNSRWIEFCQLLSERLNWLEYQNNIIAFYNQLQQLEQMTTTAENWLKIQPTTPSEPTAIKSQLKICKDEVNRLSDLQPQIERLKIQSIALKEKGQGPMFLDADFVAFTNHFKQVFSDVQAREKELQTIFDTLPPMRYQETMSAIRTWVQQSETKLSIPQLSVTDYEIMEQRLGELQALQSSLQEQQSGLYYLSTTVKEMSKKAPSEISRKYQSEFEEIEGRWKKLSSQLVEHCQKLEEQMNKLRKIQNHIQTLKKWMAEVDVFLKEEWPALGDSEILKKQLKQCRLLVSDIQTIQPSLNSVNEGGQKIKNEAEPEFASRLETELKELNTQWDHMCQQVYARKEALKGGLEKTVSLQKDLSEMHEWMTQAEEEYLERDFEYKTPDELQKAVEEMKRAKEEAQQKEAKVKLLTESVNSVIAQAPPVAQEALKKELETLTTNYQWLCTRLNGKCKTLEEVWACWHELLSYLEKANKWLNEVEFKLKTTENIPGGAEEISEVLDSLENLMRHSEDNPNQIRILAQTLTDGGVMDELINEELETFNSRWRELHEEAVRRQKLLEQSIQSAQETEKSLHLIQESLTFIDKQLAAYIADKVDAAQMPQEAQKIQSDLTSHEISLEEMKKHNQGKEAAQRVLSQIDVAQKKLQDVSMKFRLFQKPANFEQRLQESKMILDEVKMHLPALETKSVEQEVVQSQLNHCVNLYKSLSEVKSEVEMVIKTGRQIVQKKQTENPKELDERVTALKLHYNELGAKVTERKQQLEKCLKLSRKMRKEMNVLTEWLAATDMELTKRSAVEGMPSNLDSEVAWGKATQKEIEKQKVHLKSITEVGEALKTVLGKKETLVEDKLSLLNSNWIAVTSRAEEWLNLLLEYQKHMETFDQNVDHITKWIIQADTLLDESEKKKPQQKEDVLKRLKAELNDIRPKVDSTRDQAANLMANRGDHCRKLVEPQISELNHRFAAISHRIKTGKASIPLKELEQFNSDIQKLLEPLEAEIQQGVNLKEEDFNKDMNEDNEGTVKELLQRGDNLQQRITDERKREEIKIKQQLLQTKHNALKDLRSQRRKKALEISHQWYQYKRQADDLLKCLDDIEKKLASLPEPRDERKIKEIDRELQKKKEELNAVRRQAEGLSEDGAAMAVEPTQIQLSKRWREIESKFAQFRRLNFAQIHTVREETMMVMTEDMPLEISYVPSTYLTEITHVSQALLEVEQLLNAPDLCAKDFEDLFKQEESLKNIKDSLQQSSGRIDIIHSKKTAALQSATPVERVKLQEALSQLDFQWEKVNKMYKDRQGRFDRSVEKWRRFHYDIKIFNQWLTEAEQFLRKTQIPENWEHAKYKWYLKRTGDRGLILLDDVI

SEQ ID NO: 60 - DNA, 24 bp, Homo sapiens
tctttttcttcttttttccttttt

SEQ ID NO: 61 - DNA, 24 bp, Homo sapiens
ctttttcttcttttttcctttttg

SEQ ID NO: 62 - DNA, 24 bp, Homo sapiens
tttttcttcttttttcctttttgc

SEQ ID NO: 63 - DNA, 24 bp, Homo sapiens
tcttcttttttcctttttgcaaaa

SEQ ID NO: 64 - DNA, 24 bp, Homo sapiens
cttcttttttcctttttgcaaaaa

SEQ ID NO: 65 - DNA, 24 bp, Homo sapiens
ttcttttttcctttttgcaaaaac

SEQ ID NO: 66 - DNA, 24 bp, Homo sapiens
ttcctttttgcaaaaacccaaaat

SEQ ID NO: 67 - DNA, 24 bp, Homo sapiens
tcctttttgcaaaaacccaaaata

SEQ ID NO: 68 - DNA, 24 bp, Homo sapiens
cctttttgcaaaaacccaaaatat

SEQ ID NO: 69 - DNA, 24 bp, Homo sapiens
ctttttgcaaaaacccaaaatatt

SEQ ID NO: 70 - DNA, 24 bp, Homo sapiens
tgcaaaaacccaaaatattttagc

SEQ ID NO: 71 - DNA, 24 bp, Homo sapiens
gcaaaaacccaaaatattttagct

SEQ ID NO: 72 - DNA, 24 bp, Homo sapiens
caaaaacccaaaatattttagctc

SEQ ID NO: 73 - DNA, 24 bp, Homo sapiens
agctcctactcagactgttactct

SEQ ID NO: 74 - DNA, 24 bp, Homo sapiens
gctcctactcagactgttactctg

SEQ ID NO: 75 - DNA, 24 bp, Homo sapiens
cttagtaaccacaggttgtgtcac

SEQ ID NO: 76 - DNA, 24 bp, Homo sapiens
gagatggcagtttccttagtaacc

SEQ ID NO: 77 - DNA, 24 bp, Homo sapiens
tagtttggagatggcagtttcctt

SEQ ID NO: 78 - DNA, 24 bp, Homo sapiens
ttctcataccttctgcttgatgat

SEQ ID NO: 79 - DNA, 24 bp, Homo sapiens
tcattttttctcataccttctgct

SEQ ID NO: 80 - DNA, 24 bp, Homo sapiens
atcattttttctcataccttctgc

SEQ ID NO: 81 - DNA, 24 bp, Homo sapiens
aagaaaaacttctgccaactttta

SEQ ID NO: 82 - DNA, 24 bp, Homo sapiens
aaagaaaaacttctgccaactttt

SEQ ID NO: 83 - DNA, 24 bp, Homo sapiens
tctttaaaatgaagattttccacc

SEQ ID NO: 84 - DNA, 24 bp, Homo sapiens
ctttaaaatgaagattttccacca

SEQ ID NO: 85 - DNA, 24 bp, Homo sapiens
tttaaaatgaagattttccaccaa

SEQ ID NO: 86 - DNA, 24 bp, Homo sapiens
aaatgaagattttccaccaatcac

SEQ ID NO: 87 - DNA, 24 bp, Homo sapiens
ccaccaatcactttactctcctag

SEQ ID NO: 88 - DNA, 24 bp, Homo sapiens
caccaatcactttactctcctaga

SEQ ID NO: 89 - DNA, 24 bp, Homo sapiens
ctctcctagaccatttcccaccag

SEQ ID NO: 90 - DNA, 24 bp, Homo sapiens
agaaaagattaaacagtgtgctac

SEQ ID NO: 91 - DNA, 24 bp, Homo sapiens
tttgagaaaagattaaacagtgtg

SEQ ID NO: 92 - DNA, 24 bp, Homo sapiens
atttgagaaaagattaaacagtgt

SEQ ID NO: 93 - DNA, 24 bp, Homo sapiens
tatttgagaaaagattaaacagtg

SEQ ID NO: 94 - DNA, 24 bp, Homo sapiens
atcttttctcaaataaaaagacat

SEQ ID NO: 95 - DNA, 24 bp, Homo sapiens
ctcaaataaaaagacatggggctt

SEQ ID NO: 96 - DNA, 24 bp, Homo sapiens
tcaaataaaaagacatggggcttc

SEQ ID NO: 97 - DNA, 24 bp, Homo sapiens
tgttttgcctttttggtatcttac

SEQ ID NO: 98 - DNA, 24 bp, Homo sapiens
gttttgcctttttggtatcttaca

SEQ ID NO: 99 - DNA, 24 bp, Homo sapiens
ttttgcctttttggtatcttacag

SEQ ID NO: 100 - DNA, 24 bp, Homo sapiens
gcctttttggtatcttacaggaac

SEQ ID NO: 101 - DNA, 24 bp, Homo sapiens
cctttttggtatcttacaggaact

SEQ ID NO: 102 - DNA, 24 bp, Homo sapiens
tggtatcttacaggaactccagga

SEQ ID NO: 103 - DNA, 24 bp, Homo sapiens
ggtatcttacaggaactccaggat

SEQ ID NO: 104 - DNA, 24 bp, Homo sapiens
aggattgctgaattatttcttccc

SEQ ID NO: 105 - DNA, 24 bp, Homo sapiens
gaggattgctgaattatttcttcc

SEQ ID NO: 106 - DNA, 24 bp, Homo sapiens
tgaggattgctgaattatttcttc

SEQ ID NO: 107 - DNA, 24 bp, Homo sapiens
ctgtagaatactggcatctgtttt

SEQ ID NO: 108 - DNA, 24 bp, Homo sapiens
cctgtagaatactggcatctgttt

SEQ ID NO: 109 - DNA, 24 bp, Homo sapiens
tcctgtagaatactggcatctgtt

SEQ ID NO: 110 - DNA, 24 bp, Homo sapiens
cagacctcctgccaccgcagattc

SEQ ID NO: 111 - DNA, 24 bp, Homo sapiens
tgtctgacagctgtttgcagacct

SEQ ID NO: 112 - DNA, 24 bp, Homo sapiens
ctgtctgacagctgtttgcagacc

SEQ ID NO: 113 - DNA, 24 bp, Homo sapiens
tctgtctgacagctgtttgcagac

SEQ ID NO: 114 - DNA, 24 bp, Homo sapiens
ttctgtctgacagctgtttgcaga

SEQ ID NO: 115 - DNA, 24 bp, Homo sapiens
attcctattagatctgtcgcccta

SEQ ID NO: 116 - DNA, 24 bp, Homo sapiens
cattcctattagatctgtcgccct

SEQ ID NO: 117 - DNA, 24 bp, Homo sapiens
agcagactttttaagctttcttta

SEQ ID NO: 118 - DNA, 24 bp, Homo sapiens
gcagactttttaagctttctttag

SEQ ID NO: 119 - DNA, 24 bp, Homo sapiens
taagctttctttagaagaatattt

SEQ ID NO: 120 - DNA, 24 bp, Homo sapiens
aagctttctttagaagaatatttc

SEQ ID NO: 121 - DNA, 24 bp, Homo sapiens
agctttctttagaagaatatttca

SEQ ID NO: 122 - DNA, 24 bp, Homo sapiens
tttagaagaatatttcatgagaga

SEQ ID NO: 123 - DNA, 24 bp, Homo sapiens
gaagaatatttcatgagagattat

SEQ ID NO: 124 - DNA, 24 bp, Homo sapiens
tcagtataaccaaaaaatatacgc

SEQ ID NO: 125 - DNA, 24 bp, Homo sapiens
acataatccatctatttttcttga

SEQ ID NO: 126 - DNA, 24 bp, Homo sapiens
cataatccatctatttttcttgat

SEQ ID NO: 127 - DNA, 24 bp, Homo sapiens
tcttgatccatatgcttttacctg

SEQ ID NO: 128 - DNA, 24 bp, Homo sapiens
cttgatccatatgcttttacctgc

SEQ ID NO: 129 - DNA, 24 bp, Homo sapiens
ttgatccatatgcttttacctgca

SEQ ID NO: 130 - DNA, 24 bp, Homo sapiens
tcaacagatctgtcaaatcgcctg

SEQ ID NO: 131 - DNA, 24 bp, Homo sapiens
acctgcaggcgatttgacagatct

SEQ ID NO: 132 - DNA, 24 bp, Homo sapiens
cctgcaggcgatttgacagatctg

SEQ ID NO: 133 - DNA, 24 bp, Homo sapiens
acagatctgttgagaaatggcggc

SEQ ID NO: 134 - DNA, 24 bp, Homo sapiens
tatcataatgaaaacgccgccatt

SEQ ID NO: 135 - DNA, 24 bp, Homo sapiens
cattatgatataaagatatttaat

SEQ ID NO: 136 - DNA, 24 bp, Homo sapiens
tatttagcatgttcccaattctca

SEQ ID NO: 137 - DNA, 24 bp, Homo sapiens
gaaaaaacaaatcaaagacttacc

SEQ ID NO: 138 - DNA, 24 bp, Homo sapiens
atttgttttttcgaaattgtattt

SEQ ID NO: 139 - DNA, 24 bp, Homo sapiens
ttttttcgaaattgtatttatctt

SEQ ID NO: 140 - DNA, 24 bp, Homo sapiens
ttcgaaattgtatttatcttcagc

SEQ ID NO: 141 - DNA, 24 bp, Homo sapiens
tcgaaattgtatttatcttcagca

SEQ ID NO: 142 - DNA, 24 bp, Homo sapiens
cgaaattgtatttatcttcagcac

SEQ ID NO: 143 - DNA, 24 bp, Homo sapiens
gaaattgtatttatcttcagcaca

SEQ ID NO: 144 - DNA, 24 bp, Homo sapiens
agaagttaaagagtccagatgtgc

SEQ ID NO: 145 - DNA, 24 bp, Homo sapiens
tcttcagcacatctggactcttta

SEQ ID NO: 146 - DNA, 24 bp, Homo sapiens
catcacccttcagaacctgatctt

SEQ ID NO: 147 - DNA, 24 bp, Homo sapiens
acttcttaaagatcaggttctgaa

SEQ ID NO: 148 - DNA, 24 bp, Homo sapiens
gactgttgttgtcatcattatatt

SEQ ID NO: 149 - DNA, 24 bp, Homo sapiens
actgttgttgtcatcattatatta

SEQ ID NO: 150 - DNA, 24 bp, Homo sapiens
aactagaataaaaggaaaaataaa

SEQ ID NO: 151 - DNA, 24 bp, Homo sapiens
ctactatatatttatttttccttt

SEQ ID NO: 152 - DNA, 24 bp, Homo sapiens
tttttccttttattctagttgaaa

SEQ ID NO: 153 - DNA, 24 bp, Homo sapiens
tccttttattctagttgaaagaat

SEQ ID NO: 154 - DNA, 24 bp, Homo sapiens
ccttttattctagttgaaagaatt

SEQ ID NO: 155 - DNA, 24 bp, Homo sapiens
cttttattctagttgaaagaattc

SEQ ID NO: 156 - DNA, 24 bp, Homo sapiens
attctagttgaaagaattcagaat

SEQ ID NO: 157 - DNA, 24 bp, Homo sapiens
ttctagttgaaagaattcagaatc

SEQ ID NO: 158 - DNA, 24 bp, Homo sapiens
attcaactgttgcctccggttctg

SEQ ID NO: 159 - DNA, 24 bp, Homo sapiens
acatttcattcaactgttgcctcc

SEQ ID NO: 160 - DNA, 24 bp, Homo sapiens
cttttggattgcatctactgtata

SEQ ID NO: 161 - DNA, 24 bp, Homo sapiens
tgtgattttcttttggattgcatc

SEQ ID NO: 162 - DNA, 24 bp, Homo sapiens
atactaaccttggtttctgtgatt

SEQ ID NO: 163 - DNA, 24 bp, Homo sapiens
aaaaggtatctttgatactaacct

SEQ ID NO: 164 - DNA, 24 bp, Homo sapiens
aaaaaggtatctttgatactaacc

SEQ ID NO: 165 - DNA, 24 bp, Homo sapiens
ttttaaaaaggtatctttgatact

SEQ ID NO: 166 - DNA, 24 bp, Homo sapiens
attttaaaaaggtatctttgatac

SEQ ID NO: 167 - DNA, 24 bp, Homo sapiens
ttaatgcaaactgggacacaaaca

SEQ ID NO: 168 - DNA, 24 bp, Homo sapiens
taaattgccatgtttgtgtcccag

SEQ ID NO: 169 - DNA, 24 bp, Homo sapiens
aaattgccatgtttgtgtcccagt

SEQ ID NO: 170 - DNA, 24 bp, Homo sapiens
aattgccatgtttgtgtcccagtt

SEQ ID NO: 171 - DNA, 24 bp, Homo sapiens
tgtcccagtttgcattaacaaata

SEQ ID NO: 172 - DNA, 24 bp, Homo sapiens
caacatagttctcaaactatttgt

SEQ ID NO: 173 - DNA, 24 bp, Homo sapiens
ccaacatagttctcaaactatttg

SEQ ID NO: 174 - DNA, 24 bp, Homo sapiens
tccaacatagttctcaaactattt

SEQ ID NO: 175 - DNA, 24 bp, Homo sapiens
tttccaacatagttctcaaactat

SEQ ID NO: 176 - DNA, 24 bp, Homo sapiens
ttttccaacatagttctcaaacta

SEQ ID NO: 177 - DNA, 24 bp, Homo sapiens
tttttccaacatagttctcaaact

SEQ ID NO: 178 - DNA, 24 bp, Homo sapiens
cattaacaaatagtttgagaacta

SEQ ID NO: 179 - DNA, 24 bp, Homo sapiens
agaactatgttggaaaaaaaaata

SEQ ID NO: 180 - DNA, 24 bp, Homo sapiens
gttcttctagcctggagaaagaag

SEQ ID NO: 181 - DNA, 24 bp, Homo sapiens
attcttctttctccaggctagaag

SEQ ID NO: 182 - DNA, 24 bp, Homo sapiens
ttcttctttctccaggctagaaga

SEQ ID NO: 183 - DNA, 24 bp, Homo sapiens
tccaggctagaagaacaaaagaat

SEQ ID NO: 184 - DNA, 24 bp, Homo sapiens
aaattctgacaagatattcttttg

SEQ ID NO: 185 - DNA, 24 bp, Homo sapiens
cttttagttgctgctcttttccag

SEQ ID NO: 186 - DNA, 24 bp, Homo sapiens
agaaaataaaattaccttgacttg

SEQ ID NO: 187 - DNA, 24 bp, Homo sapiens
tgcaagcaggccctgggggatttg

SEQ ID NO: 188 - DNA, 24 bp, Homo sapiens
attttctcaaatcccccagggcct

SEQ ID NO: 189 - DNA, 24 bp, Homo sapiens
ttttctcaaatcccccagggcctg

SEQ ID NO: 190 - DNA, 24 bp, Homo sapiens
ctcaaatcccccagggcctgcttg

SEQ ID NO: 191 - DNA, 24 bp, Homo sapiens
tcaaatcccccagggcctgcttgc

SEQ ID NO: 192 - DNA, 24 bp, Homo sapiens
ttaattcaatcattggttttctgc

SEQ ID NO: 193 - DNA, 24 bp, Homo sapiens
taattcaatcattggttttctgcc

SEQ ID NO: 194 - DNA, 24 bp, Homo sapiens
aattcaatcattggttttctgccc

SEQ ID NO: 195 - DNA, 24 bp, Homo sapiens
attcaatcattggttttctgccca

SEQ ID NO: 196 - DNA, 24 bp, Homo sapiens
gcaaggaactatgaataacctaat

SEQ ID NO: 197 - DNA, 24 bp, Homo sapiens
ctgcccattaggttattcatagtt

SEQ ID NO: 198 - DNA, 24 bp, Homo sapiens
tgcccattaggttattcatagttc

SEQ ID NO: 199 - DNA, 24 bp, Homo sapiens
tagaaaacaatttaacaggaaata

SEQ ID NO: 200 - DNA, 24 bp, Homo sapiens
ctgttaaattgttttctataaacc

SEQ ID NO: 201 - DNA, 24 bp, Homo sapiens
gaaataaaaaagatgttactgtat

SEQ ID NO: 202 - DNA, 24 bp, Homo sapiens
agaaataaaaaagatgttactgta

SEQ ID NO: 203 - DNA, 24 bp, Homo sapiens
ctataaacccttatacagtaacat

SEQ ID NO: 204 - DNA, 24 bp, Homo sapiens
tataaacccttatacagtaacatc

SEQ ID NO: 205 - DNA, 24 bp, Homo sapiens
ttatttctaaaagtgttttggctg

SEQ ID NO: 206 - DNA, 24 bp, Homo sapiens
tatttctaaaagtgttttggctgg

SEQ ID NO: 207 - DNA, 24 bp, Homo sapiens
atttctaaaagtgttttggctggt

SEQ ID NO: 208 - DNA, 24 bp, Homo sapiens
tttctaaaagtgttttggctggtc

SEQ ID NO: 209 - DNA, 24 bp, Homo sapiens
taaaagtgttttggctggtctcac

SEQ ID NO: 210 - DNA, 24 bp, Homo sapiens
cataatacaaagtaaagtacaatt

SEQ ID NO: 211 - DNA, 24 bp, Homo sapiens
acataatacaaagtaaagtacaat

SEQ ID NO: 212 - DNA, 24 bp, Homo sapiens
ggctggtctcacaattgtacttta

SEQ ID NO: 213 - DNA, 24 bp, Homo sapiens
gctggtctcacaattgtactttac

SEQ ID NO: 214 - DNA, 24 bp, Homo sapiens
ctttgtattatgtaaaaggaatac

SEQ ID NO: 215 - DNA, 24 bp, Homo sapiens
tattatgtaaaaggaatacacaac

SEQ ID NO: 216 - DNA, 24 bp, Homo sapiens
ttcttacaggcaacaatgcaggat

SEQ ID NO: 217 - DNA, 24 bp, Homo sapiens
gaacagaggcgtccccagttggaa

SEQ ID NO: 218 - DNA, 24 bp, Homo sapiens
ggcagcggtaatgagttcttccaa

SEQ ID NO: 219 - DNA, 24 bp, Homo sapiens
tcaaattttgggcagcggtaatga

SEQ ID NO: 220 - DNA, 24 bp, Homo sapiens
aaaaacaagaccagcaatcaagag

SEQ ID NO: 221 - DNA, 24 bp, Homo sapiens
tgtgtcccatgcttgttaaaaaac

SEQ ID NO: 222 - DNA, 24 bp, Homo sapiens
ttaacaagcatgggacacacaaag

SEQ ID NO: 223 - DNA, 24 bp, Homo sapiens
taacaagcatgggacacacaaagc

SEQ ID NO: 224 - DNA, 24 bp, Homo sapiens
aacaagcatgggacacacaaagca

SEQ ID NO: 225 - DNA, 24 bp, Homo sapiens
acaagcatgggacacacaaagcaa

SEQ ID NO: 226 - DNA, 24 bp, Homo sapiens
ttgaaacttgtcatgcatcttgct

SEQ ID NO: 227 - DNA, 24 bp, Homo sapiens
attgaaacttgtcatgcatcttgc

SEQ ID NO: 228 - DNA, 24 bp, Homo sapiens
tattgaaacttgtcatgcatcttg

SEQ ID NO: 229 - DNA, 24 bp, Homo sapiens
aataaaaacttaagttcatatatc

SEQ ID NO: 230 - DNA, 24 bp, Homo sapiens
gtgaatatattattggatttctat

SEQ ID NO: 231 - DNA, 24 bp, Homo sapiens
aagataattcatgaacatcttaat

SEQ ID NO: 232 - DNA, 24 bp, Homo sapiens
acagaaaagcatacacattactta

SEQ ID NO: 233 - DNA, 24 bp, Homo sapiens
ctgttaaagaggaagttagaagat

SEQ ID NO: 234 - DNA, 24 bp, Homo sapiens
tgttaaagaggaagttagaagatc

SEQ ID NO: 235 - DNA, 24 bp, Homo sapiens
ccgccttccactcagagctcagat

SEQ ID NO: 236 - DNA, 24 bp, Homo sapiens
ccctcagctcttgaagtaaacggt

SEQ ID NO: 237 - DNA, 24 bp, Homo sapiens
cttcaagagctgagggcaaagcag

SEQ ID NO: 238 - DNA, 24 bp, Homo sapiens
aacaaatagctagagccaaagaga

SEQ ID NO: 239 - DNA, 24 bp, Homo sapiens
gaacaaatagctagagccaaagag

SEQ ID NO: 240 - DNA, 24 bp, Homo sapiens
gctctagctatttgttcaaaagtg

SEQ ID NO: 241 - DNA, 24 bp, Homo sapiens
ttcaaaagtgcaactatgaagtga

SEQ ID NO: 242 - DNA, 24 bp, Homo sapiens
tctctcacccagtcatcacttcat

SEQ ID NO: 243 - DNA, 24 bp, Homo sapiens
ctctctcacccagtcatcacttca

SEQ ID NO: 244 - DNA, 24 bp, Homo sapiens
tatatatatatatatttttctctt

SEQ ID NO: 245 - DNA, 24 bp, Homo sapiens
tctctttctatagacagctaattc

SEQ ID NO: 246 - DNA, 24 bp, Homo sapiens
ctctttctatagacagctaattca

SEQ ID NO: 247 - DNA, 24 bp, Homo sapiens
aaacagtaaaaaaatgaattagct

SEQ ID NO: 248 - DNA, 24 bp, Homo sapiens
tctttctatagacagctaattcat

SEQ ID NO: 249 - DNA, 24 bp, Homo sapiens
aaaacagtaaaaaaatgaattagc

SEQ ID NO: 250 - DNA, 24 bp, Homo sapiens
tatagacagctaattcattttttt

SEQ ID NO: 251 - DNA, 24 bp, Homo sapiens
tattctgtaatataaaaattttaa

SEQ ID NO: 252 - DNA, 24 bp, Homo sapiens
atattctgtaatataaaaatttta

SEQ ID NO: 253 - DNA, 24 bp, Homo sapiens
tttactgttttaaaatttttatat

SEQ ID NO: 254 - DNA, 24 bp, Homo sapiens
ttactgttttaaaatttttatatt

SEQ ID NO: 255 - DNA, 24 bp, Homo sapiens
tactgttttaaaatttttatatta

SEQ ID NO: 256 - DNA, 24 bp, Homo sapiens
actgttttaaaatttttatattac

SEQ ID NO: 257 - DNA, 24 bp, Homo sapiens
ctgttttaaaatttttatattaca

SEQ ID NO: 258 - DNA, 24 bp, Homo sapiens
aaaatttttatattacagaatata

SEQ ID NO: 259 - DNA, 24 bp, Homo sapiens
aaatttttatattacagaatataa

SEQ ID NO: 260 - DNA, 24 bp, Homo sapiens
ttgtagactatcttttatattctg

SEQ ID NO: 261 - DNA, 24 bp, Homo sapiens
tatattacagaatataaaagatag

SEQ ID NO: 262 - DNA, 24 bp, Homo sapiens
atattacagaatataaaagatagt

SEQ ID NO: 263 - DNA, 24 bp, Homo sapiens
tattacagaatataaaagatagtc

SEQ ID NO: 264 - DNA, 24 bp, Homo sapiens
caatgctgctgtcttcttgctatg

SEQ ID NO: 265 - DNA, 24 bp, Homo sapiens
caatgggaaaaagttaacaaaatg

SEQ ID NO: 266 - DNA, 24 bp, Homo sapiens
tgcaagtatcaagaaaaatatatg

SEQ ID NO: 267 - DNA, 24 bp, Homo sapiens
tcttgatacttgcagaaatgattt

SEQ ID NO: 268 - DNA, 24 bp, Homo sapiens
cttgatacttgcagaaatgatttg

SEQ ID NO: 269 - DNA, 24 bp, Homo sapiens
ttgatacttgcagaaatgatttgt

SEQ ID NO: 270 - DNA, 24 bp, Homo sapiens
ttttcagggaactgtagaatttat

SEQ ID NO: 271 - DNA, 24 bp, Homo sapiens
catggagggtactgaaataaattc

SEQ ID NO: 272 - DNA, 24 bp, Homo sapiens
ccatggagggtactgaaataaatt

SEQ ID NO: 273 - DNA, 24 bp, Homo sapiens
cagggaactgtagaatttatttca

SEQ ID NO: 274 - DNA, 24 bp, Homo sapiens
tccatggagggtactgaaataaat

SEQ ID NO: 275 - DNA, 24 bp, Homo sapiens
agggaactgtagaatttatttcag

SEQ ID NO: 276 - DNA, 24 bp, Homo sapiens
ttccatggagggtactgaaataaa

SEQ ID NO: 277 - DNA, 24 bp, Homo sapiens
cctgtcttttttccatggagggta

SEQ ID NO: 278 - DNA, 24 bp, Homo sapiens
ccctgtcttttttccatggagggt

SEQ ID NO: 279 - DNA, 24 bp, Homo sapiens
tccctgtcttttttccatggaggg

SEQ ID NO: 280 - DNA, 24 bp, Homo sapiens
tttcagtaccctccatggaaaaaa

SEQ ID NO: 281 - DNA, 24 bp, Homo sapiens
agtaccctccatggaaaaaagaca

SEQ ID NO: 282 - DNA, 24 bp, Homo sapiens
agtttgcatggttcttgctcaagg

SEQ ID NO: 283 - DNA, 24 bp, Homo sapiens
ataagaaaatgcattccttgagca

SEQ ID NO: 284 - DNA, 24 bp, Homo sapiens
cataagaaaatgcattccttgagc

SEQ ID NO: 285 - DNA, 24 bp, Homo sapiens
catggttcttgctcaaggaatgca

SEQ ID NO: 286 - DNA, 24 bp, Homo sapiens
acctacatgtggaaataaattttc

SEQ ID NO: 287 - DNA, 24 bp, Homo sapiens
gacctacatgtggaaataaatttt

SEQ ID NO: 288 - DNA, 24 bp, Homo sapiens
tgacctacatgtggaaataaattt

SEQ ID NO: 289 - DNA, 24 bp, Homo sapiens
cttatgaaaatttatttccacatg

SEQ ID NO: 290 - DNA, 24 bp, Homo sapiens
ttatgaaaatttatttccacatgt

SEQ ID NO: 291 - DNA, 24 bp, Homo sapiens
attacatttttgacctacatgtgg

SEQ ID NO: 292 - DNA, 24 bp, Homo sapiens
cattacatttttgacctacatgtg

SEQ ID NO: 293 - DNA, 24 bp, Homo sapiens
tcattacatttttgacctacatgt

SEQ ID NO: 294 - DNA, 24 bp, Homo sapiens
tttccacatgtaggtcaaaaatgt

SEQ ID NO: 295 - DNA, 24 bp, Homo sapiens
cacatgtaggtcaaaaatgtaatg

SEQ ID NO: 296 - DNA, 24 bp, Homo sapiens
ttgcaatccagccatgatattttt

SEQ ID NO: 297 - DNA, 24 bp, Homo sapiens
actgttggtttgttgcaatccagc

SEQ ID NO: 298 - DNA, 24 bp, Homo sapiens
cactgttggtttgttgcaatccag

SEQ ID NO: 299 - DNA, 24 bp, Homo sapiens
aatgctctcatccatagtcatagg

SEQ ID NO: 300 - DNA, 24 bp, Homo sapiens
atgtctcagtaatcttcttaccta

SEQ ID NO: 301 - DNA, 24 bp, Homo sapiens
caagttatttaatgtctcagtaat

SEQ ID NO: 302 - DNA, 24 bp, Homo sapiens
acaagttatttaatgtctcagtaa

SEQ ID NO: 303 - DNA, 24 bp, Homo sapiens
gactctgatgacatatttttcccc

SEQ ID NO: 304 - DNA, 24 bp, Homo sapiens
tccccagtatggttccagatcatg

SEQ ID NO: 305 - DNA, 24 bp, Homo sapiens
ccccagtatggttccagatcatgt

SEQ ID NO: 306 - DNA, 24 bp, Homo sapiens
cccagtatggttccagatcatgtc

SEQ ID NO: 307 - DNA, 24 bp, Homo sapiens
tatttgtctttgtgtatgtgtgta

SEQ ID NO: 308 - DNA, 24 bp, Homo sapiens
tctttgtgtatgtgtgtatgtgta

SEQ ID NO: 309 - DNA, 24 bp, Homo sapiens
tgtatgtgtgtatgtgtatgtgtt

SEQ ID NO: 310 - DNA, 24 bp, Homo sapiens
aggccagacctatttgactggaat

SEQ ID NO: 311 - DNA, 24 bp, Homo sapiens
ggccagacctatttgactggaata

SEQ ID NO: 312 - DNA, 24 bp, Homo sapiens
actggaatagtgtggtttgccagc

SEQ ID NO: 313 - DNA, 24 bp, Homo sapiens
ccagcagtcagccacacaacgact

SEQ ID NO: 314 - DNA, 24 bp, Homo sapiens
tctatgcctaattgatatctggcg

SEQ ID NO: 315 - DNA, 24 bp, Homo sapiens
ccaaccttcaggatcgagtagttt

SEQ ID NO: 316 - DNA, 24 bp, Homo sapiens
tggactaccactgcttttagtatg

SEQ ID NO: 317 - DNA, 24 bp, Homo sapiens
agtatggtagagtttaatgttttc

SEQ ID NO: 318 - DNA, 24 bp, Homo sapiens
gtatggtagagtttaatgttttca

SEQ ID NO: 319 - DNA, 24 bp, Homo sapiens
agactctaaaaggataatgaacaa

SEQ ID NO: 320 - DNA, 24 bp, Homo sapiens
actttgatttgttcattatccttt

SEQ ID NO: 321 - DNA, 24 bp, Homo sapiens
tatatttgagactctaaaaggata

SEQ ID NO: 322 - DNA, 24 bp, Homo sapiens
atttgttcattatccttttagagt

SEQ ID NO: 323 - DNA, 24 bp, Homo sapiens
gtttctatatttgagactctaaaa

SEQ ID NO: 324 - DNA, 24 bp, Homo sapiens
ggtttctatatttgagactctaaa

SEQ ID NO: 325 - DNA, 24 bp, Homo sapiens
tggtttctatatttgagactctaa

SEQ ID NO: 326 - DNA, 24 bp, Homo sapiens
ttcattatccttttagagtctcaa

SEQ ID NO: 327 - DNA, 24 bp, Homo sapiens
agagtctcaaatatagaaaccaaa

SEQ ID NO: 328 - DNA, 24 bp, Homo sapiens
gagtctcaaatatagaaaccaaaa

SEQ ID NO: 329 - DNA, 24 bp, Homo sapiens
cacttcctggatggcttcaatgct

SEQ ID NO: 330 - DNA, 24 bp, Homo sapiens
gcctcaacaagtgagcattgaagc

SEQ ID NO: 331 - DNA, 24 bp, Homo sapiens
cctcaacaagtgagcattgaagcc

SEQ ID NO: 332 - DNA, 24 bp, Homo sapiens
ggtggccttggcaacatttccact

SEQ ID NO: 333 - DNA, 24 bp, Homo sapiens
gtcactttaggtggccttggcaac

SEQ ID NO: 334 - DNA, 24 bp, Homo sapiens
atgatgtaactgaaaatgttcttc

SEQ ID NO: 335 - DNA, 24 bp, Homo sapiens
cctgttgagaatagtgcatttgat

SEQ ID NO: 336 - DNA, 24 bp, Homo sapiens
cagttacatcatcaaatgcactat

SEQ ID NO: 337 - DNA, 24 bp, Homo sapiens
agttacatcatcaaatgcactatt

SEQ ID NO: 338 - DNA, 24 bp, Homo sapiens
cacactttacctgttgagaatagt

SEQ ID NO: 339 - DNA, 24 bp, Homo sapiens
ctgttttatatgcatttttaggta

SEQ ID NO: 340 - DNA, 24 bp, Homo sapiens
tgttttatatgcatttttaggtat

SEQ ID NO: 341 - DNA, 24 bp, Homo sapiens
atatgcatttttaggtattacgtg

SEQ ID NO: 342 - DNA, 24 bp, Homo sapiens
tatgcatttttaggtattacgtgc

SEQ ID NO: 343 - DNA, 24 bp, Homo sapiens
taggtattacgtgcacatatatat

SEQ ID NO: 344 - DNA, 24 bp, Homo sapiens
aggtattacgtgcacatatatata

SEQ ID NO: 345 - DNA, 24 bp, Homo sapiens
ggtattacgtgcacatatatatat

SEQ ID NO: 346 - DNA, 24 bp, Homo sapiens
agcaacaactataatattgtgcag

SEQ ID NO: 347 - DNA, 24 bp, Homo sapiens
gttcctccatctttctctttttat

SEQ ID NO: 348 - DNA, 24 bp, Homo sapiens
tctttttatggagttcactaggtg

SEQ ID NO: 349 - DNA, 24 bp, Homo sapiens
tatggagttcactaggtgcaccat

SEQ ID NO: 350 - DNA, 24 bp, Homo sapiens
atggagttcactaggtgcaccatt

SEQ ID NO: 351 - DNA, 24 bp, Homo sapiens
tggagttcactaggtgcaccattc

SEQ ID NO: 352 - DNA, 24 bp, Homo sapiens
ataattgcatctgaacatttggtc

SEQ ID NO: 353 - DNA, 24 bp, Homo sapiens
gtcctttgcagggtgagtgagcga

SEQ ID NO: 354 - DNA, 24 bp, Homo sapiens
ttccaaagcagcctctcgctcact

SEQ ID NO: 355 - DNA, 24 bp, Homo sapiens
cagggtgagtgagcgagaggctgc

SEQ ID NO: 356 - DNA, 24 bp, Homo sapiens
gaagaaactcatagattactgcaa

SEQ ID NO: 357 - DNA, 24 bp, Homo sapiens
caggtccagggggaactgttgcag

SEQ ID NO: 358 - DNA, 24 bp, Homo sapiens
ccaggtccagggggaactgttgca

SEQ ID NO: 359 - DNA, 24 bp, Homo sapiens
agcttctgtaagccaggcaagaaa

SEQ ID NO: 360 - DNA, 24 bp, Homo sapiens
ttgcctggcttacagaagctgaaa

SEQ ID NO: 361 - DNA, 24 bp, Homo sapiens
cttacgggtagcatcctgtaggac

SEQ ID NO: 362 - DNA, 24 bp, Homo sapiens
ctcccttggagtcttctaggagcc

SEQ ID NO: 363 - DNA, 24 bp, Homo sapiens
actcccttggagtcttctaggagc

SEQ ID NO: 364 - DNA, 24 bp, Homo sapiens
atcagctcttttactcccttggag

SEQ ID NO: 365 - DNA, 24 bp, Homo sapiens
cgctttagcactcttgtggatcca

SEQ ID NO: 366 - DNA, 24 bp, Homo sapiens
gcactcttgtggatccaattgaac

SEQ ID NO: 367 - DNA, 24 bp, Homo sapiens
tccctggcttgtcagttacaagta

SEQ ID NO: 368 - DNA, 24 bp, Homo sapiens
gtccctggcttgtcagttacaagt

SEQ ID NO: 369 - DNA, 24 bp, Homo sapiens
ttttgtccctggcttgtcagttac

SEQ ID NO: 370 - DNA, 24 bp, Homo sapiens
gttttgtccctggcttgtcagtta

SEQ ID NO: 371 - DNA, 24 bp, Homo sapiens
tacttgtaactgacaagccaggga

SEQ ID NO: 372 - DNA, 24 bp, Homo sapiens
gctcctactcagactgttactctg

SEQ ID NO: 373 - DNA, 24 bp, Homo sapiens
taccatgtattgctaaacaaagta

SEQ ID NO: 374 - DNA, 24 bp, Homo sapiens
attgaagagtaacaatttgagcca

SEQ ID NO: 375 - DNA, 24 bp, Mus musculus
aggctctgcaaagttctttgaaag

SEQ ID NO: 376 - DNA, 24 bp, Mus musculus
aaagagcaacaaaatggcttcaac

SEQ ID NO: 377 - DNA, 24 bp, Mus musculus
aaagagcaataaaatggcttcaac

SEQ ID NO: 378 - DNA, 24 bp, Mus musculus
aaagaactttgcagagcctcaaaa

SEQ ID NO: 379 - DNA, 24 bp, Mus musculus
ctgaatatctatgcattaataact

SEQ ID NO: 380 - DNA, 24 bp, Mus musculus
tattatattacagggcatattata

SEQ ID NO: 381 - DNA, 24 bp, Mus musculus
aggtaagccgaggtttggccttta

SEQ ID NO: 382 - DNA, 24 bp, Mus musculus
cccagagtccttcaaagatattga

SEQ ID NO: 383 - RNA, 24 nt, Artificial Sequence
  source: /note="Description of Artificial Sequence: Synthetic oligonucleotide"
aaaaaggaaaaaagaagaaaaaga

SEQ ID NO: 384 - RNA, 24 nt, Artificial Sequence
  source: /note="Description of Artificial Sequence: Synthetic oligonucleotide"
caaaaaggaaaaaagaagaaaaag

SEQ ID NO: 385 - RNA, 24 nt, Artificial Sequence
  source: /note="Description of Artificial Sequence: Synthetic oligonucleotide"
gcaaaaaggaaaaaagaagaaaaa

SEQ ID NO: 386 - RNA, 24 nt, Artificial Sequence
  source: /note="Description of Artificial Sequence: Synthetic oligonucleotide"
uuuugcaaaaaggaaaaaagaaga

SEQ ID NO: 387 - RNA, 24 nt, Artificial Sequence
  source: /note="Description of Artificial Sequence: Synthetic oligonucleotide"
uuuuugcaaaaaggaaaaaagaag

SEQ ID NO: 388 - RNA, 24 nt, Artificial Sequence
  source: /note="Description of Artificial Sequence: Synthetic oligonucleotide"
guuuuugcaaaaaggaaaaaagaa

SEQ ID NO: 389 - RNA, 24 nt, Artificial Sequence
  source: /note="Description of Artificial Sequence: Synthetic oligonucleotide"
auuuuggguuuuugcaaaaaggaa

SEQ ID NO: 390 - RNA, 24 nt, Artificial Sequence
  source: /note="Description of Artificial Sequence: Synthetic oligonucleotide"
uauuuuggguuuuugcaaaaagga

SEQ ID NO: 391 - RNA, 24 nt, Artificial Sequence
  source: /note="Description of Artificial Sequence: Synthetic oligonucleotide"
auauuuuggguuuuugcaaaaagg

SEQ ID NO: 392 - RNA, 24 nt, Artificial Sequence
  source: /note="Description of Artificial Sequence: Synthetic oligonucleotide"
aauauuuuggguuuuugcaaaaag

SEQ ID NO: 393 - RNA, 24 nt, Artificial Sequence
  source: /note="Description of Artificial Sequence: Synthetic oligonucleotide"
gcuaaaauauuuuggguuuuugca

SEQ ID NO: 394 - RNA, 24 nt, Artificial Sequence
  source: /note="Description of Artificial Sequence: Synthetic oligonucleotide"
agcuaaaauauuuuggguuuuugc

SEQ ID NO: 395 - RNA, 24 nt, Artificial Sequence
  source: /note="Description of Artificial Sequence: Synthetic oligonucleotide"
gagcuaaaauauuuuggguuuuug

SEQ ID NO: 396 - RNA, 24 nt, Artificial Sequence
  source: /note="Description of Artificial Sequence: Synthetic oligonucleotide"
agaguaacagucugaguaggagcu

SEQ ID NO: 397 - RNA, 24 nt, Artificial Sequence
  source: /note="Description of Artificial Sequence: Synthetic oligonucleotide"
cagaguaacagucugaguaggagc

SEQ ID NO: 398 - RNA, 24 nt, Artificial Sequence
  source: /note="Description of Artificial Sequence: Synthetic oligonucleotide"
gugacacaaccugugguuacuaag

SEQ ID NO: 399 - RNA, 23 nt, Artificial Sequence
  source: /note="Description of Artificial Sequence: Synthetic oligonucleotide"
gguuacuaaggaaacugccaucu

SEQ ID NO: 400 - RNA, 24 nt, Artificial Sequence
  source: /note="Description of Artificial Sequence: Synthetic oligonucleotide"
aaggaaacugccaucuccaaacua

SEQ ID NO: 401 - RNA, 24 nt, Artificial Sequence
  source: /note="Description of Artificial Sequence: Synthetic oligonucleotide"
aucaucaagcagaagguaugagaa

SEQ ID NO: 402 - RNA, 24 nt, Artificial Sequence
  source: /note="Description of Artificial Sequence: Synthetic oligonucleotide"
agcagaagguaugagaaaaaauga

SEQ ID NO: 403 - RNA, 24 nt, Artificial Sequence
  source: /note="Description of Artificial Sequence: Synthetic oligonucleotide"
gcagaagguaugagaaaaaaugau

SEQ ID NO: 404 - RNA, 24 nt, Artificial Sequence
  source: /note="Description of Artificial Sequence: Synthetic oligonucleotide"
uaaaaguuggcagaaguuuuucuu

SEQ ID NO: 405 - RNA, 24 nt, Artificial Sequence
  source: /note="Description of Artificial Sequence: Synthetic oligonucleotide"
aaaaguuggcagaaguuuuucuuu

SEQ ID NO: 406 - RNA, 24 nt, Artificial Sequence
  source: /note="Description of Artificial Sequence: Synthetic oligonucleotide"
gguggaaaaucuucauuuuaaaga

SEQ ID NO: 407 - RNA, 24 nt, Artificial Sequence
  source: /note="Description of Artificial Sequence: Synthetic oligonucleotide"
ugguggaaaaucuucauuuuaaag

SEQ ID NO: 408 - RNA, 24 nt, Artificial Sequence
  source: /note="Description of Artificial Sequence: Synthetic oligonucleotide"
uugguggaaaaucuucauuuuaaa

SEQ ID NO: 409 - RNA, 24 nt, Artificial Sequence
  source: /note="Description of Artificial Sequence: Synthetic oligonucleotide"
gugauugguggaaaaucuucauuu

SEQ ID NO: 410 - RNA, 24 nt, Artificial Sequence
  source: /note="Description of Artificial Sequence: Synthetic oligonucleotide"
cuaggagaguaaagugauuggugg

SEQ ID NO: 411 - RNA, 24 nt, Artificial Sequence
  source: /note="Description of Artificial Sequence: Synthetic oligonucleotide"
ucuaggagaguaaagugauuggug

SEQ ID NO: 412 - RNA, 23 nt, Artificial Sequence
  source: /note="Description of Artificial Sequence: Synthetic oligonucleotide"
cuggugggaaauggucuaggaga

SEQ ID NO: 413 - RNA, 24 nt, Artificial Sequence
  source: /note="Description of Artificial Sequence: Synthetic oligonucleotide"
guagcacacuguuuaaucuuuucu

SEQ ID NO: 414 - RNA, 24 nt, Artificial Sequence
  source: /note="Description of Artificial Sequence: Synthetic oligonucleotide"
cacacuguuuaaucuuuucucaaa

SEQ ID NO: 415 - RNA, 24 nt, Artificial Sequence
  source: /note="Description of Artificial Sequence: Synthetic oligonucleotide"
acacuguuuaaucuuuucucaaau

SEQ ID NO: 416 - RNA, 24 nt, Artificial Sequence
  source: /note="Description of Artificial Sequence: Synthetic oligonucleotide"
cacuguuuaaucuuuucucaaaua

SEQ ID NO: 417 - RNA, 24 nt, Artificial Sequence
  source: /note="Description of Artificial Sequence: Synthetic oligonucleotide"
augucuuuuuauuugagaaaagau

SEQ ID NO: 418 - RNA, 24 nt, Artificial Sequence
  source: /note="Description of Artificial Sequence: Synthetic oligonucleotide"
aagccccaugucuuuuuauuugag

SEQ ID NO: 419 - RNA, 24 nt, Artificial Sequence
  source: /note="Description of Artificial Sequence: Synthetic oligonucleotide"
gaagccccaugucuuuuuauuuga

SEQ ID NO: 420 - RNA, 24 nt, Artificial Sequence
  source: /note="Description of Artificial Sequence: Synthetic oligonucleotide"
guaagauaccaaaaaggcaaaaca

SEQ ID NO: 421 - RNA, 24 nt, Artificial Sequence
  source: /note="Description of Artificial Sequence: Synthetic oligonucleotide"
uguaagauaccaaaaaggcaaaac

SEQ ID NO: 422 - RNA, 24 nt, Artificial Sequence
  source: /note="Description of Artificial Sequence: Synthetic oligonucleotide"
cuguaagauaccaaaaaggcaaaa

SEQ ID NO: 423 - RNA, 24 nt, Artificial Sequence
  source: /note="Description of Artificial Sequence: Synthetic oligonucleotide"
guuccuguaagauaccaaaaaggc

SEQ ID NO: 424 - RNA, 24 nt, Artificial Sequence
  source: /note="Description of Artificial Sequence: Synthetic oligonucleotide"
aguuccuguaagauaccaaaaagg

SEQ ID NO: 425 - RNA, 24 nt, Artificial Sequence
  source: /note="Description of Artificial Sequence: Synthetic oligonucleotide"
uccuggaguuccuguaagauacca

SEQ ID NO: 426 - RNA, 24 nt, Artificial Sequence
  source: /note="Description of Artificial Sequence: Synthetic oligonucleotide"
auccuggaguuccuguaagauacc

SEQ ID NO: 427 - RNA, 24 nt, Artificial Sequence
  source: /note="Description of Artificial Sequence: Synthetic oligonucleotide"
gggaagaaauaauucagcaauccu

SEQ ID NO: 428 - RNA, 24 nt, Artificial Sequence
  source: /note="Description of Artificial Sequence: Synthetic oligonucleotide"
ggaagaaauaauucagcaauccuc

SEQ ID NO: 429 - RNA, 24 nt, Artificial Sequence
  source: /note="Description of Artificial Sequence: Synthetic oligonucleotide"
gaagaaauaauucagcaauccuca

SEQ ID NO: 430 - RNA, 24 nt, Artificial Sequence
  source: /note="Description of Artificial Sequence: Synthetic oligonucleotide"
aaaacagaugccaguauucuacag

SEQ ID NO: 431 - RNA, 24 nt, Artificial Sequence
  source: /note="Description of Artificial Sequence: Synthetic oligonucleotide"
aaacagaugccaguauucuacagg

SEQ ID NO: 432 - RNA, 24 nt, Artificial Sequence
  source: /note="Description of Artificial Sequence: Synthetic oligonucleotide"
aacagaugccaguauucuacagga

SEQ ID NO: 433 - RNA, 24 nt, Artificial Sequence
  source: /note="Description of Artificial Sequence: Synthetic oligonucleotide"
gaaucugcgguggcaggaggucug

SEQ ID NO: 434 - RNA, 24 nt, Artificial Sequence
  source: /note="Description of Artificial Sequence: Synthetic oligonucleotide"
aggucugcaaacagcugucagaca

SEQ ID NO: 435 - RNA, 24 nt, Artificial Sequence
  source: /note="Description of Artificial Sequence: Synthetic oligonucleotide"
ggucugcaaacagcugucagacag

SEQ ID NO: 436 - RNA, 24 nt, Artificial Sequence
  source: /note="Description of Artificial Sequence: Synthetic oligonucleotide"
gucugcaaacagcugucagacaga

SEQ ID NO: 437 - RNA, 24 nt, Artificial Sequence
  source: /note="Description of Artificial Sequence: Synthetic oligonucleotide"
ucugcaaacagcugucagacagaa

SEQ ID NO: 438 - RNA, 24 nt, Artificial Sequence
  source: /note="Description of Artificial Sequence: Synthetic oligonucleotide"
uagggcgacagaucuaauaggaau

SEQ ID NO: 439 - RNA, 24 nt, Artificial Sequence
  source: /note="Description of Artificial Sequence: Synthetic oligonucleotide"
agggcgacagaucuaauaggaaug

SEQ ID NO: 440 - RNA, 24 nt, Artificial Sequence
  source: /note="Description of Artificial Sequence: Synthetic oligonucleotide"
uaaagaaagcuuaaaaagucugcu

SEQ ID NO: 441 - RNA, 24 nt, Artificial Sequence
  source: /note="Description of Artificial Sequence: Synthetic oligonucleotide"
cuaaagaaagcuuaaaaagucugc

SEQ ID NO: 442 - RNA, 24 nt, Artificial Sequence
  source: /note="Description of Artificial Sequence: Synthetic oligonucleotide"
aaauauucuucuaaagaaagcuua

SEQ ID NO: 443 - RNA, 24 nt, Artificial Sequence
  source: /note="Description of Artificial Sequence: Synthetic oligonucleotide"
gaaauauucuucuaaagaaagcuu

SEQ ID NO: 444 - RNA, 24 nt, Artificial Sequence
  source: /note="Description of Artificial Sequence: Synthetic oligonucleotide"
ugaaauauucuucuaaagaaagcu

SEQ ID NO: 445 - RNA, 24 nt, Artificial Sequence
  source: /note="Description of Artificial Sequence: Synthetic oligonucleotide"
ucucucaugaaauauucuucuaaa

SEQ ID NO: 446 - RNA, 24 nt, Artificial Sequence
  source: /note="Description of Artificial Sequence: Synthetic oligonucleotide"
auaaucucucaugaaauauucuuc

SEQ ID NO: 447 - RNA, 24 nt, Artificial Sequence
  source: /note="Description of Artificial Sequence: Synthetic oligonucleotide"
gcguauauuuuuugguuauacuga

SEQ ID NO: 448 - RNA, 24 nt, Artificial Sequence
  source: /note="Description of Artificial Sequence: Synthetic oligonucleotide"
ucaagaaaaauagauggauuaugu

SEQ ID NO: 449 - RNA, 24 nt, Artificial Sequence
  source: /note="Description of Artificial Sequence: Synthetic oligonucleotide"
aucaagaaaaauagauggauuaug

SEQ ID NO: 450 - RNA, 24 nt, Artificial Sequence
  source: /note="Description of Artificial Sequence: Synthetic oligonucleotide"
cagguaaaagcauauggaucaaga

SEQ ID NO: 451 - RNA, 24 nt, Artificial Sequence
  source: /note="Description of Artificial Sequence: Synthetic oligonucleotide"
gcagguaaaagcauauggaucaag

SEQ ID NO: 452 - RNA, 24 nt, Artificial Sequence
  source: /note="Description of Artificial Sequence: Synthetic oligonucleotide"
ugcagguaaaagcauauggaucaa

SEQ ID NO: 453 - RNA, 24 nt, Artificial Sequence
  source: /note="Description of Artificial Sequence: Synthetic oligonucleotide"
caggcgauuugacagaucuguuga

SEQ ID NO: 454 - RNA, 24 nt, Artificial Sequence
  source: /note="Description of Artificial Sequence: Synthetic oligonucleotide"
agaucugucaaaucgccugcaggu

SEQ ID NO: 455 - RNA, 24 nt, Artificial Sequence
  source: /note="Description of Artificial Sequence: Synthetic oligonucleotide"
cagaucugucaaaucgccugcagg

SEQ ID NO: 456 - RNA, 24 nt, Artificial Sequence
  source: /note="Description of Artificial Sequence: Synthetic oligonucleotide"
gccgccauuucucaacagaucugu

SEQ ID NO: 457 - RNA, 24 nt, Artificial Sequence
  source: /note="Description of Artificial Sequence: Synthetic oligonucleotide"
aauggcggcguuuucauuaugaua

SEQ ID NO: 458 - RNA, 24 nt, Artificial Sequence
  source: /note="Description of Artificial Sequence: Synthetic oligonucleotide"
auuaaauaucuuuauaucauaaug

SEQ ID NO: 459 - RNA, 24 nt, Artificial Sequence
  source: /note="Description of Artificial Sequence: Synthetic oligonucleotide"
ugagaauugggaacaugcuaaaua

SEQ ID NO: 460 - RNA, 24 nt, Artificial Sequence
  source: /note="Description of Artificial Sequence: Synthetic oligonucleotide"
gguaagucuuugauuuguuuuuuc

SEQ ID NO: 461 - RNA, 24 nt, Artificial Sequence
  source: /note="Description of Artificial Sequence: Synthetic oligonucleotide"
aaauacaauuucgaaaaaacaaau

SEQ ID NO: 462 - RNA, 24 nt, Artificial Sequence
  source: /note="Description of Artificial Sequence: Synthetic oligonucleotide"
aagauaaauacaauuucgaaaaaa

SEQ ID NO: 463 - RNA, 24 nt, Artificial Sequence
  source: /note="Description of Artificial Sequence: Synthetic oligonucleotide"
gcugaagauaaauacaauuucgaa

SEQ ID NO: 464 - RNA, 24 nt, Artificial Sequence
  source: /note="Description of Artificial Sequence: Synthetic oligonucleotide"
ugcugaagauaaauacaauuucga

SEQ ID NO: 465 - RNA, 24 nt, Artificial Sequence
  source: /note="Description of Artificial Sequence: Synthetic oligonucleotide"
gugcugaagauaaauacaauuucg

SEQ ID NO: 466 - RNA, 24 nt, Artificial Sequence
  source: /note="Description of Artificial Sequence: Synthetic oligonucleotide"
ugugcugaagauaaauacaauuuc

SEQ ID NO: 467 - RNA, 24 nt, Artificial Sequence
  source: /note="Description of Artificial Sequence: Synthetic oligonucleotide"
gcacaucuggacucuuuaacuucu

SEQ ID NO: 468 - RNA, 24 nt, Artificial Sequence
  source: /note="Description of Artificial Sequence: Synthetic oligonucleotide"
uaaagaguccagaugugcugaaga

SEQ ID NO: 469 - RNA, 24 nt, Artificial Sequence
  source: /note="Description of Artificial Sequence: Synthetic oligonucleotide"
aagaucagguucugaagggugaug

SEQ ID NO: 470 - RNA, 24 nt, Artificial Sequence
  source: /note="Description of Artificial Sequence: Synthetic oligonucleotide"
uucagaaccugaucuuuaagaagu

SEQ ID NO: 471 - RNA, 24 nt, Artificial Sequence
  source: /note="Description of Artificial Sequence: Synthetic oligonucleotide"
aauauaaugaugacaacaacaguc

SEQ ID NO: 472 - RNA, 24 nt, Artificial Sequence
  source: /note="Description of Artificial Sequence: Synthetic oligonucleotide"
uaauauaaugaugacaacaacagu

SEQ ID NO: 473 - RNA, 24 nt, Artificial Sequence
  source: /note="Description of Artificial Sequence: Synthetic oligonucleotide"
uuuauuuuuccuuuuauucuaguu

SEQ ID NO: 474 - RNA, 24 nt, Artificial Sequence
  source: /note="Description of Artificial Sequence: Synthetic oligonucleotide"
aaaggaaaaauaaauauauaguag

SEQ ID NO: 475 - RNA, 24 nt, Artificial Sequence
  source: /note="Description of Artificial Sequence: Synthetic oligonucleotide"
uuucaacuagaauaaaaggaaaaa

SEQ ID NO: 476 - RNA, 24 nt, Artificial Sequence
  source: /note="Description of Artificial Sequence: Synthetic oligonucleotide"
auucuuucaacuagaauaaaagga

SEQ ID NO: 477 - RNA, 24 nt, Artificial Sequence
  source: /note="Description of Artificial Sequence: Synthetic oligonucleotide"
aauucuuucaacuagaauaaaagg

SEQ ID NO: 478 - RNA, 24 nt, Artificial Sequence
  source: /note="Description of Artificial Sequence: Synthetic oligonucleotide"
gaauucuuucaacuagaauaaaag

SEQ ID NO: 479 - RNA, 24 nt, Artificial Sequence
  source: /note="Description of Artificial Sequence: Synthetic oligonucleotide"
auucugaauucuuucaacuagaau

SEQ ID NO: 480 - RNA, 24 nt, Artificial Sequence
  source: /note="Description of Artificial Sequence: Synthetic oligonucleotide"
gauucugaauucuuucaacuagaa

SEQ ID NO: 481 - RNA, 24 nt, Artificial Sequence
  source: /note="Description of Artificial Sequence: Synthetic oligonucleotide"
cagaaccggaggcaacaguugaau

SEQ ID NO: 482 - RNA, 24 nt, Artificial Sequence
  source: /note="Description of Artificial Sequence: Synthetic oligonucleotide"
ggaggcaacaguugaaugaaaugu

SEQ ID NO: 483 - RNA, 24 nt, Artificial Sequence
  source: /note="Description of Artificial Sequence: Synthetic oligonucleotide"
uauacaguagaugcaauccaaaag

SEQ ID NO: 484 - RNA, 24 nt, Artificial Sequence
  source: /note="Description of Artificial Sequence: Synthetic oligonucleotide"
gaugcaauccaaaagaaaaucaca

SEQ ID NO: 485 - RNA, 24 nt, Artificial Sequence
  source: /note="Description of Artificial Sequence: Synthetic oligonucleotide"
aaucacagaaaccaagguuaguau

SEQ ID NO: 486 - RNA, 23 nt, Artificial Sequence
  source: /note="Description of Artificial Sequence: Synthetic oligonucleotide"
agguuaguaucaaagauaccuuu

SEQ ID NO: 487 - RNA, 24 nt, Artificial Sequence
  source: /note="Description of Artificial Sequence: Synthetic oligonucleotide"
gguuaguaucaaagauaccuuuuu

SEQ ID NO: 488 - RNA, 24 nt, Artificial Sequence
  source: /note="Description of Artificial Sequence: Synthetic oligonucleotide"
aguaucaaagauaccuuuuuaaaa

SEQ ID NO: 489 - RNA, 24 nt, Artificial Sequence
  source: /note="Description of Artificial Sequence: Synthetic oligonucleotide"
guaucaaagauaccuuuuuaaaau

SEQ ID NO: 490 - RNA, 24 nt, Artificial Sequence
  source: /note="Description of Artificial Sequence: Synthetic oligonucleotide"
uguuugugucccaguuugcauuaa

SEQ ID NO: 491 - RNA, 24 nt, Artificial Sequence
  source: /note="Description of Artificial Sequence: Synthetic oligonucleotide"
cugggacacaaacauggcaauuua

SEQ ID NO: 492 - RNA, 24 nt, Artificial Sequence
  source: /note="Description of Artificial Sequence: Synthetic oligonucleotide"
acugggacacaaacauggcaauuu

SEQ ID NO: 493 - RNA, 24 nt, Artificial Sequence
  source: /note="Description of Artificial Sequence: Synthetic oligonucleotide"
aacugggacacaaacauggcaauu

SEQ ID NO: 494 - RNA, 24 nt, Artificial Sequence
  source: /note="Description of Artificial Sequence: Synthetic oligonucleotide"
uauuuguuaaugcaaacugggaca

SEQ ID NO: 495 - RNA, 24 nt, Artificial Sequence
  source: /note="Description of Artificial Sequence: Synthetic oligonucleotide"
acaaauaguuugagaacuauguug

SEQ ID NO: 496 - RNA, 24 nt, Artificial Sequence
  source: /note="Description of Artificial Sequence: Synthetic oligonucleotide"
caaauaguuugagaacuauguugg

SEQ ID NO: 497 - RNA, 24 nt, Artificial Sequence
  source: /note="Description of Artificial Sequence: Synthetic oligonucleotide"
aaauaguuugagaacuauguugga

SEQ ID NO: 498 - RNA, 24 nt, Artificial Sequence
  source: /note="Description of Artificial Sequence: Synthetic oligonucleotide"
auaguuugagaacuauguuggaaa

SEQ ID NO: 499 - RNA, 24 nt, Artificial Sequence
  source: /note="Description of Artificial Sequence: Synthetic oligonucleotide"
uaguuugagaacuauguuggaaaa

SEQ ID NO: 500 - RNA, 24 nt, Artificial Sequence
  source: /note="Description of Artificial Sequence: Synthetic oligonucleotide"
aguuugagaacuauguuggaaaaa

SEQ ID NO: 501 - RNA, 24 nt, Artificial Sequence
  source: /note="Description of Artificial Sequence: Synthetic oligonucleotide"
uaguucucaaacuauuuguuaaug

SEQ ID NO: 502 - RNA, 24 nt, Artificial Sequence
  source: /note="Description of Artificial Sequence: Synthetic oligonucleotide"
uauuuuuuuuuccaacauaguucu

SEQ ID NO: 503 - RNA, 24 nt, Artificial Sequence
  source: /note="Description of Artificial Sequence: Synthetic oligonucleotide"
cuucuuucuccaggcuagaagaac

SEQ ID NO: 504 - RNA, 24 nt, Artificial Sequence
  source: /note="Description of Artificial Sequence: Synthetic oligonucleotide"
cuucuagccuggagaaagaagaau

SEQ ID NO: 505 - RNA, 24 nt, Artificial Sequence
  source: /note="Description of Artificial Sequence: Synthetic oligonucleotide"
ucuucuagccuggagaaagaagaa

SEQ ID NO: 506 - RNA, 24 nt, Artificial Sequence
  source: /note="Description of Artificial Sequence: Synthetic oligonucleotide"
auucuuuuguucuucuagccugga

SEQ ID NO: 507 - RNA, 24 nt, Artificial Sequence
  source: /note="Description of Artificial Sequence: Synthetic oligonucleotide"
caaaagaauaucuugucagaauuu

SEQ ID NO: 508 - RNA, 24 nt, Artificial Sequence
  source: /note="Description of Artificial Sequence: Synthetic oligonucleotide"
cuggaaaagagcagcaacuaaaag

SEQ ID NO: 509 - RNA, 24 nt, Artificial Sequence
  source: /note="Description of Artificial Sequence: Synthetic oligonucleotide"
caagucaagguaauuuuauuuucu

SEQ ID NO: 510 - RNA, 24 nt, Artificial Sequence
  source: /note="Description of Artificial Sequence: Synthetic oligonucleotide"
caaaucccccagggccugcuugca

SEQ ID NO: 511 - RNA, 24 nt, Artificial Sequence
  source: /note="Description of Artificial Sequence: Synthetic oligonucleotide"
aggcccugggggauuugagaaaau

SEQ ID NO: 512 - RNA, 24 nt, Artificial Sequence
  source: /note="Description of Artificial Sequence: Synthetic oligonucleotide"
caggcccugggggauuugagaaaa

SEQ ID NO: 513 - RNA, 24 nt, Artificial Sequence
  source: /note="Description of Artificial Sequence: Synthetic oligonucleotide"
caagcaggcccugggggauuugag

SEQ ID NO: 514 - RNA, 24 nt, Artificial Sequence
  source: /note="Description of Artificial Sequence: Synthetic oligonucleotide"
gcaagcaggcccugggggauuuga

SEQ ID NO: 515 - RNA, 24 nt, Artificial Sequence
  source: /note="Description of Artificial Sequence: Synthetic oligonucleotide"
gcagaaaaccaaugauugaauuaa

SEQ ID NO: 516 - RNA, 24 nt, Artificial Sequence
  source: /note="Description of Artificial Sequence: Synthetic oligonucleotide"
ggcagaaaaccaaugauugaauua

SEQ ID NO: 517 - RNA, 24 nt, Artificial Sequence
  source: /note="Description of Artificial Sequence: Synthetic oligonucleotide"
gggcagaaaaccaaugauugaauu

SEQ ID NO: 518 - RNA, 24 nt, Artificial Sequence
  source: /note="Description of Artificial Sequence: Synthetic oligonucleotide"
ugggcagaaaaccaaugauugaau

SEQ ID NO: 519 - RNA, 24 nt, Artificial Sequence
  source: /note="Description of Artificial Sequence: Synthetic oligonucleotide"
auuagguuauucauaguuccuugc

SEQ ID NO: 520 - RNA, 24 nt, Artificial Sequence
  source: /note="Description of Artificial Sequence: Synthetic oligonucleotide"
aacuaugaauaaccuaaugggcag

SEQ ID NO: 521 - RNA, 24 nt, Artificial Sequence
  source: /note="Description of Artificial Sequence: Synthetic oligonucleotide"
gaacuaugaauaaccuaaugggca

SEQ ID NO: 522 - RNA, 24 nt, Artificial Sequence
  source: /note="Description of Artificial Sequence: Synthetic oligonucleotide"
uauuuccuguuaaauuguuuucua

SEQ ID NO: 523 - RNA, 24 nt, Artificial Sequence
  source: /note="Description of Artificial Sequence: Synthetic oligonucleotide"
gguuuauagaaaacaauuuaacag

SEQ ID NO: 524 - RNA, 24 nt, Artificial Sequence
  source: /note="Description of Artificial Sequence: Synthetic oligonucleotide"
auacaguaacaucuuuuuuauuuc

SEQ ID NO: 525 - RNA, 24 nt, Artificial Sequence
  source: /note="Description of Artificial Sequence: Synthetic oligonucleotide"
uacaguaacaucuuuuuuauuucu

SEQ ID NO: 526 - RNA, 24 nt, Artificial Sequence
  source: /note="Description of Artificial Sequence: Synthetic oligonucleotide"
auguuacuguauaaggguuuauag

SEQ ID NO: 527 - RNA, 24 nt, Artificial Sequence
  source: /note="Description of Artificial Sequence: Synthetic oligonucleotide"
gauguuacuguauaaggguuuaua

SEQ ID NO: 528 - RNA, 24 nt, Artificial Sequence
  source: /note="Description of Artificial Sequence: Synthetic oligonucleotide"
cagccaaaacacuuuuagaaauaa

SEQ ID NO: 529 - RNA, 24 nt, Artificial Sequence
  source: /note="Description of Artificial Sequence: Synthetic oligonucleotide"
ccagccaaaacacuuuuagaaaua

SEQ ID NO: 530 - RNA, 24 nt, Artificial Sequence
  source: /note="Description of Artificial Sequence: Synthetic oligonucleotide"
accagccaaaacacuuuuagaaau

SEQ ID NO: 531 - RNA, 24 nt, Artificial Sequence
  source: /note="Description of Artificial Sequence: Synthetic oligonucleotide"
gaccagccaaaacacuuuuagaaa

SEQ ID NO: 532 - RNA, 24 nt, Artificial Sequence
  source: /note="Description of Artificial Sequence: Synthetic oligonucleotide"
gugagaccagccaaaacacuuuua

SEQ ID NO: 533 - RNA, 24 nt, Artificial Sequence
  source: /note="Description of Artificial Sequence: Synthetic oligonucleotide"
aauuguacuuuacuuuguauuaug

SEQ ID NO: 534 - RNA, 24 nt, Artificial Sequence
  source: /note="Description of Artificial Sequence: Synthetic oligonucleotide"
auuguacuuuacuuuguauuaugu

SEQ ID NO: 535 - RNA, 24 nt, Artificial Sequence
  source: /note="Description of Artificial Sequence: Synthetic oligonucleotide"
uaaaguacaauugugagaccagcc

SEQ ID NO: 536 - RNA, 24 nt, Artificial Sequence
  source: /note="Description of Artificial Sequence: Synthetic oligonucleotide"
guaaaguacaauugugagaccagc

SEQ ID NO: 537 - RNA, 24 nt, Artificial Sequence
  source: /note="Description of Artificial Sequence: Synthetic oligonucleotide"
guauuccuuuuacauaauacaaag

SEQ ID NO: 538 - RNA, 24 nt, Artificial Sequence
  source: /note="Description of Artificial Sequence: Synthetic oligonucleotide"
guuguguauuccuuuuacauaaua

SEQ ID NO: 539 - RNA, 24 nt, Artificial Sequence
  source: /note="Description of Artificial Sequence: Synthetic oligonucleotide"
auccugcauuguugccuguaagaa

SEQ ID NO: 540 - RNA, 24 nt, Artificial Sequence
  source: /note="Description of Artificial Sequence: Synthetic oligonucleotide"
uuccaacuggggacgccucuguuc

SEQ ID NO: 541 - RNA, 24 nt, Artificial Sequence
  source: /note="Description of Artificial Sequence: Synthetic oligonucleotide"
uuggaagaacucauuaccgcugcc

SEQ ID NO: 542 - RNA, 24 nt, Artificial Sequence
  source: /note="Description of Artificial Sequence: Synthetic oligonucleotide"
ucauuaccgcugcccaaaauuuga

SEQ ID NO: 543 - RNA, 24 nt, Artificial Sequence
  source: /note="Description of Artificial Sequence: Synthetic oligonucleotide"
cucuugauugcuggucuuguuuuu

SEQ ID NO: 544 - RNA, 24 nt, Artificial Sequence
  source: /note="Description of Artificial Sequence: Synthetic oligonucleotide"
guuuuuuaacaagcaugggacaca

SEQ ID NO: 545 - RNA, 24 nt, Artificial Sequence
  source: /note="Description of Artificial Sequence: Synthetic oligonucleotide"
cuuugugugucccaugcuuguuaa

SEQ ID NO: 546 - RNA, 24 nt, Artificial Sequence
  source: /note="Description of Artificial Sequence: Synthetic oligonucleotide"
gcuuugugugucccaugcuuguua

SEQ ID NO: 547 - RNA, 24 nt, Artificial Sequence
  source: /note="Description of Artificial Sequence: Synthetic oligonucleotide"
ugcuuugugugucccaugcuuguu

SEQ ID NO: 548 - RNA, 24 nt, Artificial Sequence
  source: /note="Description of Artificial Sequence: Synthetic oligonucleotide"
uugcuuugugugucccaugcuugu

SEQ ID NO: 549 - RNA, 24 nt, Artificial Sequence
  source: /note="Description of Artificial Sequence: Synthetic oligonucleotide"
agcaagaugcaugacaaguuucaa

SEQ ID NO: 550 - RNA, 24 nt, Artificial Sequence
  source: /note="Description of Artificial Sequence: Synthetic oligonucleotide"
gcaagaugcaugacaaguuucaau

SEQ ID NO: 551 - RNA, 24 nt, Artificial Sequence
  source: /note="Description of Artificial Sequence: Synthetic oligonucleotide"
caagaugcaugacaaguuucaaua

SEQ ID NO: 552 - RNA, 24 nt, Artificial Sequence
  source: /note="Description of Artificial Sequence: Synthetic oligonucleotide"
gauauaugaacuuaaguuuuuauu

SEQ ID NO: 553 - RNA, 24 nt, Artificial Sequence
  source: /note="Description of Artificial Sequence: Synthetic oligonucleotide"
auagaaauccaauaauauauucac

SEQ ID NO: 554 - RNA, 24 nt, Artificial Sequence
  source: /note="Description of Artificial Sequence: Synthetic oligonucleotide"
auuaagauguucaugaauuaucuu

SEQ ID NO: 555 - RNA, 24 nt, Artificial Sequence
  source: /note="Description of Artificial Sequence: Synthetic oligonucleotide"
uaaguaauguguaugcuuuucugu

SEQ ID NO: 556 - RNA, 24 nt, Artificial Sequence
  source: /note="Description of Artificial Sequence: Synthetic oligonucleotide"
aucuucuaacuuccucuuuaacag

SEQ ID NO: 557 - RNA, 24 nt, Artificial Sequence
  source: /note="Description of Artificial Sequence: Synthetic oligonucleotide"
gaucuucuaacuuccucuuuaaca

SEQ ID NO: 558 - RNA, 24 nt, Artificial Sequence
  source: /note="Description of Artificial Sequence: Synthetic oligonucleotide"
aucugagcucugaguggaaggcgg

SEQ ID NO: 559 - RNA, 24 nt, Artificial Sequence
  source: /note="Description of Artificial Sequence: Synthetic oligonucleotide"
accguuuacuucaagagcugaggg

SEQ ID NO: 560 - RNA, 24 nt, Artificial Sequence
  source: /note="Description of Artificial Sequence: Synthetic oligonucleotide"
cugcuuugcccucagcucuugaag

SEQ ID NO: 561 - RNA, 24 nt, Artificial Sequence
  source: /note="Description of Artificial Sequence: Synthetic oligonucleotide"
ucucuuuggcucuagcuauuuguu

SEQ ID NO: 562 - RNA, 24 nt, Artificial Sequence
  source: /note="Description of Artificial Sequence: Synthetic oligonucleotide"
cucuuuggcucuagcuauuuguuc

SEQ ID NO: 563 - RNA, 24 nt, Artificial Sequence
  source: /note="Description of Artificial Sequence: Synthetic oligonucleotide"
cacuuuugaacaaauagcuagagc

SEQ ID NO: 564 - RNA, 24 nt, Artificial Sequence
  source: /note="Description of Artificial Sequence: Synthetic oligonucleotide"
ucacuucauaguugcacuuuugaa

SEQ ID NO: 565 - RNA, 24 nt, Artificial Sequence
  source: /note="Description of Artificial Sequence: Synthetic oligonucleotide"
augaagugaugacugggugagaga

SEQ ID NO: 566 - RNA, 24 nt, Artificial Sequence
  source: /note="Description of Artificial Sequence: Synthetic oligonucleotide"
ugaagugaugacugggugagagag

SEQ ID NO: 567 - RNA, 24 nt, Artificial Sequence
  source: /note="Description of Artificial Sequence: Synthetic oligonucleotide"
aagagaaaaauauauauauauaua

SEQ ID NO: 568 - RNA, 24 nt, Artificial Sequence
  source: /note="Description of Artificial Sequence: Synthetic oligonucleotide"
gaauuagcugucuauagaaagaga

SEQ ID NO: 569 - RNA, 24 nt, Artificial Sequence
  source: /note="Description of Artificial Sequence: Synthetic oligonucleotide"
ugaauuagcugucuauagaaagag

SEQ ID NO: 570 - RNA, 24 nt, Artificial Sequence
  source: /note="Description of Artificial Sequence: Synthetic oligonucleotide"
agcuaauucauuuuuuuacuguuu

SEQ ID NO: 571 - RNA, 24 nt, Artificial Sequence
  source: /note="Description of Artificial Sequence: Synthetic oligonucleotide"
augaauuagcugucuauagaaaga

SEQ ID NO: 572 - RNA, 24 nt, Artificial Sequence
  source: /note="Description of Artificial Sequence: Synthetic oligonucleotide"
gcuaauucauuuuuuuacuguuuu

SEQ ID NO: 573 - RNA, 24 nt, Artificial Sequence
  source: /note="Description of Artificial Sequence: Synthetic oligonucleotide"
aaaaaaaugaauuagcugucuaua

SEQ ID NO: 574 - RNA, 24 nt, Artificial Sequence
  source: /note="Description of Artificial Sequence: Synthetic oligonucleotide"
uuaaaauuuuuauauuacagaaua

SEQ ID NO: 575 - RNA, 24 nt, Artificial Sequence
  source: /note="Description of Artificial Sequence: Synthetic oligonucleotide"
uaaaauuuuuauauuacagaauau

SEQ ID NO: 576 - RNA, 24 nt, Artificial Sequence
  source: /note="Description of Artificial Sequence: Synthetic oligonucleotide"
auauaaaaauuuuaaaacaguaaa

SEQ ID NO: 577 - RNA, 24 nt, Artificial Sequence
  source: /note="Description of Artificial Sequence: Synthetic oligonucleotide"
aauauaaaaauuuuaaaacaguaa

SEQ ID NO: 578 - RNA, 24 nt, Artificial Sequence
  source: /note="Description of Artificial Sequence: Synthetic oligonucleotide"
uaauauaaaaauuuuaaaacagua

SEQ ID NO: 579 - RNA, 24 nt, Artificial Sequence
  source: /note="Description of Artificial Sequence: Synthetic oligonucleotide"
guaauauaaaaauuuuaaaacagu

SEQ ID NO: 580 - RNA, 24 nt, Artificial Sequence
  source: /note="Description of Artificial Sequence: Synthetic oligonucleotide"
uguaauauaaaaauuuuaaaacag

SEQ ID NO: 581 - RNA, 24 nt, Artificial Sequence
  source: /note="Description of Artificial Sequence: Synthetic oligonucleotide"
uauauucuguaauauaaaaauuuu

SEQ ID NO: 582 - RNA, 24 nt, Artificial Sequence
  source: /note="Description of Artificial Sequence: Synthetic oligonucleotide"
uuauauucuguaauauaaaaauuu

SEQ ID NO: 583 - RNA, 24 nt, Artificial Sequence
  source: /note="Description of Artificial Sequence: Synthetic oligonucleotide"
cagaauauaaaagauagucuacaa

SEQ ID NO: 584 - RNA, 24 nt, Artificial Sequence
  source: /note="Description of Artificial Sequence: Synthetic oligonucleotide"
cuaucuuuuauauucuguaauaua

SEQ ID NO: 585 - RNA, 24 nt, Artificial Sequence
  source: /note="Description of Artificial Sequence: Synthetic oligonucleotide"
acuaucuuuuauauucuguaauau

SEQ ID NO: 586 - RNA, 24 nt, Artificial Sequence
  source: /note="Description of Artificial Sequence: Synthetic oligonucleotide"
gacuaucuuuuauauucuguaaua

SEQ ID NO: 587 - RNA, 24 nt, Artificial Sequence
  source: /note="Description of Artificial Sequence: Synthetic oligonucleotide"
cauagcaagaagacagcagcauug

SEQ ID NO: 588 - RNA, 24 nt, Artificial Sequence
  source: /note="Description of Artificial Sequence: Synthetic oligonucleotide"
cauuuuguuaacuuuuucccauug

SEQ ID NO: 589 - RNA, 24 nt, Artificial Sequence
  source: /note="Description of Artificial Sequence: Synthetic oligonucleotide"
cauauauuuuucuugauacuugca

SEQ ID NO: 590 - RNA, 24 nt, Artificial Sequence
  source: /note="Description of Artificial Sequence: Synthetic oligonucleotide"
aaaucauuucugcaaguaucaaga

SEQ ID NO: 591 - RNA, 24 nt, Artificial Sequence
  source: /note="Description of Artificial Sequence: Synthetic oligonucleotide"
caaaucauuucugcaaguaucaag

SEQ ID NO: 592 - RNA, 24 nt, Artificial Sequence
  source: /note="Description of Artificial Sequence: Synthetic oligonucleotide"
acaaaucauuucugcaaguaucaa

SEQ ID NO: 593 - RNA, 24 nt, Artificial Sequence
  source: /note="Description of Artificial Sequence: Synthetic oligonucleotide"
auaaauucuacaguucccugaaaa

SEQ ID NO: 594 - RNA, 24 nt, Artificial Sequence
  source: /note="Description of Artificial Sequence: Synthetic oligonucleotide"
gaauuuauuucaguacccuccaug

SEQ ID NO: 595 - RNA, 24 nt, Artificial Sequence
  source: /note="Description of Artificial Sequence: Synthetic oligonucleotide"
aauuuauuucaguacccuccaugg

SEQ ID NO: 596 - RNA, 24 nt, Artificial Sequence
  source: /note="Description of Artificial Sequence: Synthetic oligonucleotide"
ugaaauaaauucuacaguucccug

SEQ ID NO: 597 - RNA, 24 nt, Artificial Sequence
  source: /note="Description of Artificial Sequence: Synthetic oligonucleotide"
auuuauuucaguacccuccaugga

SEQ ID NO: 598 - RNA, 24 nt, Artificial Sequence
  source: /note="Description of Artificial Sequence: Synthetic oligonucleotide"
cugaaauaaauucuacaguucccu

SEQ ID NO: 599 - RNA, 24 nt, Artificial Sequence
  source: /note="Description of Artificial Sequence: Synthetic oligonucleotide"
uuuauuucaguacccuccauggaa

SEQ ID NO: 600 - RNA, 24 nt, Artificial Sequence
  source: /note="Description of Artificial Sequence: Synthetic oligonucleotide"
uacccuccauggaaaaaagacagg

SEQ ID NO: 601 - RNA, 24 nt, Artificial Sequence
  source: /note="Description of Artificial Sequence: Synthetic oligonucleotide"
acccuccauggaaaaaagacaggg

SEQ ID NO: 602 - RNA, 24 nt, Artificial Sequence
  source: /note="Description of Artificial Sequence: Synthetic oligonucleotide"
cccuccauggaaaaaagacaggga

SEQ ID NO: 603 - RNA, 24 nt, Artificial Sequence
  source: /note="Description of Artificial Sequence: Synthetic oligonucleotide"
uuuuuuccauggaggguacugaaa

SEQ ID NO: 604 - RNA, 24 nt, Artificial Sequence
  source: /note="Description of Artificial Sequence: Synthetic oligonucleotide"
ugucuuuuuuccauggaggguacu

SEQ ID NO: 605 - RNA, 24 nt, Artificial Sequence
  source: /note="Description of Artificial Sequence: Synthetic oligonucleotide"
ccuugagcaagaaccaugcaaacu

SEQ ID NO: 606 - RNA, 24 nt, Artificial Sequence
  source: /note="Description of Artificial Sequence: Synthetic oligonucleotide"
ugcucaaggaaugcauuuucuuau

SEQ ID NO: 607 - RNA, 24 nt, Artificial Sequence
  source: /note="Description of Artificial Sequence: Synthetic oligonucleotide"
gcucaaggaaugcauuuucuuaug

SEQ ID NO: 608 - RNA, 24 nt, Artificial Sequence
  source: /note="Description of Artificial Sequence: Synthetic oligonucleotide"
ugcauuccuugagcaagaaccaug

SEQ ID NO: 609 - RNA, 24 nt, Artificial Sequence
  source: /note="Description of Artificial Sequence: Synthetic oligonucleotide"
gaaaauuuauuuccacauguaggu

SEQ ID NO: 610 - RNA, 24 nt, Artificial Sequence
  source: /note="Description of Artificial Sequence: Synthetic oligonucleotide"
aaaauuuauuuccacauguagguc

SEQ ID NO: 611 - RNA, 24 nt, Artificial Sequence
  source: /note="Description of Artificial Sequence: Synthetic oligonucleotide"
aaauuuauuuccacauguagguca

SEQ ID NO: 612 - RNA, 24 nt, Artificial Sequence
  source: /note="Description of Artificial Sequence: Synthetic oligonucleotide"
cauguggaaauaaauuuucauaag

SEQ ID NO: 613 - RNA, 24 nt, Artificial Sequence
  source: /note="Description of Artificial Sequence: Synthetic oligonucleotide"
acauguggaaauaaauuuucauaa

SEQ ID NO: 614 - RNA, 24 nt, Artificial Sequence
  source: /note="Description of Artificial Sequence: Synthetic oligonucleotide"
ccacauguaggucaaaaauguaau

SEQ ID NO: 615 - RNA, 24 nt, Artificial Sequence
  source: /note="Description of Artificial Sequence: Synthetic oligonucleotide"
cacauguaggucaaaaauguaaug

SEQ ID NO: 616 - RNA, 24 nt, Artificial Sequence
  source: /note="Description of Artificial Sequence: Synthetic oligonucleotide"
acauguaggucaaaaauguaauga

SEQ ID NO: 617 - RNA, 24 nt, Artificial Sequence
  source: /note="Description of Artificial Sequence: Synthetic oligonucleotide"
acauuuuugaccuacauguggaaa

SEQ ID NO: 618 - RNA, 24 nt, Artificial Sequence
  source: /note="Description of Artificial Sequence: Synthetic oligonucleotide"
cauuacauuuuugaccuacaugug

SEQ ID NO: 619 - RNA, 24 nt, Artificial Sequence
  source: /note="Description of Artificial Sequence: Synthetic oligonucleotide"
aaaaauaucauggcuggauugcaa

SEQ ID NO: 620 - RNA, 24 nt, Artificial Sequence
  source: /note="Description of Artificial Sequence: Synthetic oligonucleotide"
gcuggauugcaacaaaccaacagu

SEQ ID NO: 621 - RNA, 24 nt, Artificial Sequence
  source: /note="Description of Artificial Sequence: Synthetic oligonucleotide"
cuggauugcaacaaaccaacagug

SEQ ID NO: 622 - RNA, 24 nt, Artificial Sequence
  source: /note="Description of Artificial Sequence: Synthetic oligonucleotide"
ccuaugacuauggaugagagcauu

SEQ ID NO: 623 - RNA, 24 nt, Artificial Sequence
  source: /note="Description of Artificial Sequence: Synthetic oligonucleotide"
uagguaagaagauuacugagacau

SEQ ID NO: 624 - RNA, 24 nt, Artificial Sequence
  source: /note="Description of Artificial Sequence: Synthetic oligonucleotide"
auuacugagacauuaaauaacuug

SEQ ID NO: 625 - RNA, 24 nt, Artificial Sequence
  source: /note="Description of Artificial Sequence: Synthetic oligonucleotide"
uuacugagacauuaaauaacuugu

SEQ ID NO: 626 - RNA, 24 nt, Artificial Sequence
  source: /note="Description of Artificial Sequence: Synthetic oligonucleotide"
ggggaaaaauaugucaucagaguc

SEQ ID NO: 627 - RNA, 24 nt, Artificial Sequence
  source: /note="Description of Artificial Sequence: Synthetic oligonucleotide"
caugaucuggaaccauacugggga

SEQ ID NO: 628 - RNA, 24 nt, Artificial Sequence
  source: /note="Description of Artificial Sequence: Synthetic oligonucleotide"
acaugaucuggaaccauacugggg

SEQ ID NO: 629 - RNA, 24 nt, Artificial Sequence
  source: /note="Description of Artificial Sequence: Synthetic oligonucleotide"
gacaugaucuggaaccauacuggg

SEQ ID NO: 630 - RNA, 24 nt, Artificial Sequence
  source: /note="Description of Artificial Sequence: Synthetic oligonucleotide"
uacacacauacacaaagacaaaua

SEQ ID NO: 631 - RNA, 24 nt, Artificial Sequence
  source: /note="Description of Artificial Sequence: Synthetic oligonucleotide"
uacacauacacacauacacaaaga

SEQ ID NO: 632 - RNA, 24 nt, Artificial Sequence
  source: /note="Description of Artificial Sequence: Synthetic oligonucleotide"
aacacauacacauacacacauaca

SEQ ID NO: 633 - RNA, 24 nt, Artificial Sequence
  source: /note="Description of Artificial Sequence: Synthetic oligonucleotide"
auuccagucaaauaggucuggccu

SEQ ID NO: 634 - RNA, 24 nt, Artificial Sequence
  source: /note="Description of Artificial Sequence: Synthetic oligonucleotide"
uauuccagucaaauaggucuggcc

SEQ ID NO: 635 - RNA, 24 nt, Artificial Sequence
  source: /note="Description of Artificial Sequence: Synthetic oligonucleotide"
gcuggcaaaccacacuauuccagu

SEQ ID NO: 636 - RNA, 24 nt, Artificial Sequence
  source: /note="Description of Artificial Sequence: Synthetic oligonucleotide"
agucguuguguggcugacugcugg

SEQ ID NO: 637 - RNA, 24 nt, Artificial Sequence
  source: /note="Description of Artificial Sequence: Synthetic oligonucleotide"
cgccagauaucaauuaggcauaga

SEQ ID NO: 638 - RNA, 24 nt, Artificial Sequence
  source: /note="Description of Artificial Sequence: Synthetic oligonucleotide"
aaacuacucgauccugaagguugg

SEQ ID NO: 639 - RNA, 24 nt, Artificial Sequence
  source: /note="Description of Artificial Sequence: Synthetic oligonucleotide"
cauacuaaaagcagugguagucca

SEQ ID NO: 640 - RNA, 24 nt, Artificial Sequence
  source: /note="Description of Artificial Sequence: Synthetic oligonucleotide"
gaaaacauuaaacucuaccauacu

SEQ ID NO: 641 - RNA, 24 nt, Artificial Sequence
  source: /note="Description of Artificial Sequence: Synthetic oligonucleotide"
ugaaaacauuaaacucuaccauac

SEQ ID NO: 642 - RNA, 24 nt, Artificial Sequence
  source: /note="Description of Artificial Sequence: Synthetic oligonucleotide"
uuguucauuauccuuuuagagucu

SEQ ID NO: 643 - RNA, 24 nt, Artificial Sequence
  source: /note="Description of Artificial Sequence: Synthetic oligonucleotide"
aaaggauaaugaacaaaucaaagu

SEQ ID NO: 644 - RNA, 24 nt, Artificial Sequence
  source: /note="Description of Artificial Sequence: Synthetic oligonucleotide"
uauccuuuuagagucucaaauaua

SEQ ID NO: 645 - RNA, 24 nt, Artificial Sequence
  source: /note="Description of Artificial Sequence: Synthetic oligonucleotide"
acucuaaaaggauaaugaacaaau

SEQ ID NO: 646 - RNA, 24 nt, Artificial Sequence
  source: /note="Description of Artificial Sequence: Synthetic oligonucleotide"
uuuuagagucucaaauauagaaac

SEQ ID NO: 647 - RNA, 24 nt, Artificial Sequence
  source: /note="Description of Artificial Sequence: Synthetic oligonucleotide"
uuuagagucucaaauauagaaacc

SEQ ID NO: 648 - RNA, 24 nt, Artificial Sequence
  source: /note="Description of Artificial Sequence: Synthetic oligonucleotide"
uuagagucucaaauauagaaacca

SEQ ID NO: 649 - RNA, 24 nt, Artificial Sequence
  source: /note="Description of Artificial Sequence: Synthetic oligonucleotide"
uugagacucuaaaaggauaaugaa

SEQ ID NO: 650 - RNA, 24 nt, Artificial Sequence
  source: /note="Description of Artificial Sequence: Synthetic oligonucleotide"
uuugguuucuauauuugagacucu

SEQ ID NO: 651 - RNA, 24 nt, Artificial Sequence
  source: /note="Description of Artificial Sequence: Synthetic oligonucleotide"
uuuugguuucuauauuugagacuc

SEQ ID NO: 652 - RNA, 24 nt, Artificial Sequence
  source: /note="Description of Artificial Sequence: Synthetic oligonucleotide"
agcauugaagccauccaggaagug

SEQ ID NO: 653 - RNA, 24 nt, Artificial Sequence
  source: /note="Description of Artificial Sequence: Synthetic oligonucleotide"
gcuucaaugcucacuuguugaggc

SEQ ID NO: 654 - RNA, 24 nt, Artificial Sequence
  source: /note="Description of Artificial Sequence: Synthetic oligonucleotide"
ggcuucaaugcucacuuguugagg

SEQ ID NO: 655 - RNA, 24 nt, Artificial Sequence
  source: /note="Description of Artificial Sequence: Synthetic oligonucleotide"
aguggaaauguugccaaggccacc

SEQ ID NO: 656 - RNA, 24 nt, Artificial Sequence
  source: /note="Description of Artificial Sequence: Synthetic oligonucleotide"
guugccaaggccaccuaaagugac

SEQ ID NO: 657 - RNA, 24 nt, Artificial Sequence
  source: /note="Description of Artificial Sequence: Synthetic oligonucleotide"
gaagaacauuuucaguuacaucau

SEQ ID NO: 658 - RNA, 24 nt, Artificial Sequence
  source: /note="Description of Artificial Sequence: Synthetic oligonucleotide"
aucaaaugcacuauucucaacagg

SEQ ID NO: 659 - RNA, 24 nt, Artificial Sequence
  source: /note="Description of Artificial Sequence: Synthetic oligonucleotide"
auagugcauuugaugauguaacug

SEQ ID NO: 660 - RNA, 24 nt, Artificial Sequence
  source: /note="Description of Artificial Sequence: Synthetic oligonucleotide"
aauagugcauuugaugauguaacu

SEQ ID NO: 661 - RNA, 24 nt, Artificial Sequence
  source: /note="Description of Artificial Sequence: Synthetic oligonucleotide"
acuauucucaacagguaaagugug

SEQ ID NO: 662 - RNA, 24 nt, Artificial Sequence
  source: /note="Description of Artificial Sequence: Synthetic oligonucleotide"
uaccuaaaaaugcauauaaaacag

SEQ ID NO: 663 - RNA, 24 nt, Artificial Sequence
  source: /note="Description of Artificial Sequence: Synthetic oligonucleotide"
auaccuaaaaaugcauauaaaaca

SEQ ID NO: 664 - RNA, 24 nt, Artificial Sequence
  source: /note="Description of Artificial Sequence: Synthetic oligonucleotide"
cacguaauaccuaaaaaugcauau

SEQ ID NO: 665 - RNA, 24 nt, Artificial Sequence
  source: /note="Description of Artificial Sequence: Synthetic oligonucleotide"
gcacguaauaccuaaaaaugcaua

SEQ ID NO: 666 - RNA, 24 nt, Artificial Sequence
  source: /note="Description of Artificial Sequence: Synthetic oligonucleotide"
auauauaugugcacguaauaccua

SEQ ID NO: 667 - RNA, 24 nt, Artificial Sequence
  source: /note="Description of Artificial Sequence: Synthetic oligonucleotide"
uauauauaugugcacguaauaccu

SEQ ID NO: 668 - RNA, 24 nt, Artificial Sequence
  source: /note="Description of Artificial Sequence: Synthetic oligonucleotide"
auauauauaugugcacguaauacc

SEQ ID NO: 669 - RNA, 24 nt, Artificial Sequence
  source: /note="Description of Artificial Sequence: Synthetic oligonucleotide"
cugcacaauauuauaguuguugcu

SEQ ID NO: 670 - RNA, 24 nt, Artificial Sequence
  source: /note="Description of Artificial Sequence: Synthetic oligonucleotide"
auaaaaagagaaagauggaggaac

SEQ ID NO: 671 - RNA, 24 nt, Artificial Sequence
  source: /note="Description of Artificial Sequence: Synthetic oligonucleotide"
caccuagugaacuccauaaaaaga

SEQ ID NO: 672 - RNA, 24 nt, Artificial Sequence
  source: /note="Description of Artificial Sequence: Synthetic oligonucleotide"
auggugcaccuagugaacuccaua

SEQ ID NO: 673 - RNA, 24 nt, Artificial Sequence
  source: /note="Description of Artificial Sequence: Synthetic oligonucleotide"
aauggugcaccuagugaacuccau

SEQ ID NO: 674 - RNA, 24 nt, Artificial Sequence
  source: /note="Description of Artificial Sequence: Synthetic oligonucleotide"
gaauggugcaccuagugaacucca

SEQ ID NO: 675 - RNA, 24 nt, Artificial Sequence
  source: /note="Description of Artificial Sequence: Synthetic oligonucleotide"
gaccaaauguucagaugcaauuau

SEQ ID NO: 676 - RNA, 24 nt, Artificial Sequence
  source: /note="Description of Artificial Sequence: Synthetic oligonucleotide"
ucgcucacucacccugcaaaggac

SEQ ID NO: 677 - RNA, 24 nt, Artificial Sequence
  source: /note="Description of Artificial Sequence: Synthetic oligonucleotide"
agugagcgagaggcugcuuuggaa

SEQ ID NO: 678 - RNA, 24 nt, Artificial Sequence
  source: /note="Description of Artificial Sequence: Synthetic oligonucleotide"
gcagccucucgcucacucacccug

SEQ ID NO: 679 - RNA, 24 nt, Artificial Sequence
  source: /note="Description of Artificial Sequence: Synthetic oligonucleotide"
uugcaguaaucuaugaguuucuuc

SEQ ID NO: 680 - RNA, 24 nt, Artificial Sequence
  source: /note="Description of Artificial Sequence: Synthetic oligonucleotide"
cugcaacaguucccccuggaccug

SEQ ID NO: 681 - RNA, 24 nt, Artificial Sequence
  source: /note="Description of Artificial Sequence: Synthetic oligonucleotide"
ugcaacaguucccccuggaccugg

SEQ ID NO: 682 - RNA, 24 nt, Artificial Sequence
  source: /note="Description of Artificial Sequence: Synthetic oligonucleotide"
uuucuugccuggcuuacagaagcu

SEQ ID NO: 683 - RNA, 24 nt, Artificial Sequence
  source: /note="Description of Artificial Sequence: Synthetic oligonucleotide"
uuucagcuucuguaagccaggcaa

SEQ ID NO: 684 - RNA, 24 nt, Artificial Sequence
  source: /note="Description of Artificial Sequence: Synthetic oligonucleotide"
guccuacaggaugcuacccguaag

SEQ ID NO: 685 - RNA, 24 nt, Artificial Sequence
  source: /note="Description of Artificial Sequence: Synthetic oligonucleotide"
ggcuccuagaagacuccaagggag

SEQ ID NO: 686 - RNA, 24 nt, Artificial Sequence
  source: /note="Description of Artificial Sequence: Synthetic oligonucleotide"
gcuccuagaagacuccaagggagu

SEQ ID NO: 687 - RNA, 24 nt, Artificial Sequence
  source: /note="Description of Artificial Sequence: Synthetic oligonucleotide"
cuccaagggaguaaaagagcugau

SEQ ID NO: 688 - RNA, 24 nt, Artificial Sequence
  source: /note="Description of Artificial Sequence: Synthetic oligonucleotide"
uggauccacaagagugcuaaagcg

SEQ ID NO: 689 - RNA, 24 nt, Artificial Sequence
  source: /note="Description of Artificial Sequence: Synthetic oligonucleotide"
guucaauuggauccacaagagugc

SEQ ID NO: 690 - RNA, 24 nt, Artificial Sequence
  source: /note="Description of Artificial Sequence: Synthetic oligonucleotide"
uacuuguaacugacaagccaggga

SEQ ID NO: 691 - RNA, 24 nt, Artificial Sequence
  source: /note="Description of Artificial Sequence: Synthetic oligonucleotide"
acuuguaacugacaagccagggac

SEQ ID NO: 692 - RNA, 24 nt, Artificial Sequence
  source: /note="Description of Artificial Sequence: Synthetic oligonucleotide"
guaacugacaagccagggacaaaa

SEQ ID NO: 693 - RNA, 24 nt, Artificial Sequence
  source: /note="Description of Artificial Sequence: Synthetic oligonucleotide"
uaacugacaagccagggacaaaac

SEQ ID NO: 694 - RNA, 24 nt, Artificial Sequence
  source: /note="Description of Artificial Sequence: Synthetic oligonucleotide"
ucccuggcuugucaguuacaagua

SEQ ID NO: 695 - RNA, 24 nt, Artificial Sequence
  source: /note="Description of Artificial Sequence: Synthetic oligonucleotide"
cagaguaacagucugaguaggagc

SEQ ID NO: 696 - RNA, 24 nt, Artificial Sequence
  source: /note="Description of Artificial Sequence: Synthetic oligonucleotide"
uacuuuguuuagcaauacauggua

SEQ ID NO: 697 - RNA, 24 nt, Artificial Sequence
  source: /note="Description of Artificial Sequence: Synthetic oligonucleotide"
uggcucaaauuguuacucuucaau

SEQ ID NO: 698 - RNA, 24 nt, Artificial Sequence
  source: /note="Description of Artificial Sequence: Synthetic oligonucleotide"
cuuucaaagaacuuugcagagccu

SEQ ID NO: 699 - RNA, 24 nt, Artificial Sequence
  source: /note="Description of Artificial Sequence: Synthetic oligonucleotide"
guugaagccauuuuguugcucuuu

SEQ ID NO: 700 - RNA, 24 nt, Artificial Sequence
  source: /note="Description of Artificial Sequence: Synthetic oligonucleotide"
guugaagccauuuuauugcucuuu

SEQ ID NO: 701 - RNA, 24 nt, Artificial Sequence
  source: /note="Description of Artificial Sequence: Synthetic oligonucleotide"
uuuugaggcucugcaaaguucuuu

SEQ ID NO: 702 - RNA, 24 nt, Artificial Sequence
  source: /note="Description of Artificial Sequence: Synthetic oligonucleotide"
aguuauuaaugcauagauauucag

SEQ ID NO: 703 - RNA, 24 nt, Artificial Sequence
  source: /note="Description of Artificial Sequence: Synthetic oligonucleotide"
uauaauaugcccuguaauauaaua

SEQ ID NO: 704 - RNA, 24 nt, Artificial Sequence
  source: /note="Description of Artificial Sequence: Synthetic oligonucleotide"
uaaaggccaaaccucggcuuaccu

SEQ ID NO: 705 - RNA, 24 nt, Artificial Sequence
  source: /note="Description of Artificial Sequence: Synthetic oligonucleotide"
ucaauaucuuugaaggacucuggg

SEQ ID NO: 706 - DNA, 19 bp, Mus musculus
agagtaacagtctgactgg

SEQ ID NO: 707 - DNA, 19 bp, Mus musculus
gaaatgatcatcaaacaga

SEQ ID NO: 708 - DNA, 20 bp, Mus musculus
cactagagtaacagtctgac

SEQ ID NO: 709 - RNA, 19 nt, Artificial Sequence
  source: /note="Description of Artificial Sequence: Synthetic oligonucleotide"
ccagucagacuguuacucu

SEQ ID NO: 710 - RNA, 19 nt, Artificial Sequence
  source: /note="Description of Artificial Sequence: Synthetic oligonucleotide"
ucuguuugaugaucauuuc

SEQ ID NO: 711 - RNA, 20 nt, Artificial Sequence
  source: /note="Description of Artificial Sequence: Synthetic oligonucleotide"
gucagacuguuacucuagug

SEQ ID NO: 712 - DNA, 19 bp, Homo sapiens
agagtaacagtctgagtag

SEQ ID NO: 713 - DNA, 19 bp, Homo sapiens
gagatgatcatcaagcaga

SEQ ID NO: 714 - DNA, 20 bp, Homo sapiens
caccagagtaacagtctgag

SEQ ID NO: 715 - RNA, 19 nt, Artificial Sequence
  source: /note="Description of Artificial Sequence: Synthetic oligonucleotide"
cuacucagacuguuacucu

SEQ ID NO: 716 - RNA, 19 nt, Artificial Sequence
  source: /note="Description of Artificial Sequence: Synthetic oligonucleotide"
ucugcuugaugaucaucuc

SEQ ID NO: 717 - RNA, 20 nt, Artificial Sequence
  source: /note="Description of Artificial Sequence: Synthetic oligonucleotide"
cucagacuguuacucuggug

SEQ ID NO: 718 - DNA, 20 bp, Homo sapiens
caccagagtaacagtctgag

SEQ ID NO: 719 - DNA, 20 bp, Homo sapiens
tattttgggtttttgcaaaa

SEQ ID NO: 720 - DNA, 20 bp, Homo sapiens
agtaggagctaaaatatttt

SEQ ID NO: 721 - DNA, 20 bp, Homo sapiens
gagtaggagctaaaatattt

SEQ ID NO: 722 - DNA, 20 bp, Homo sapiens
accagagtaacagtctgagt

SEQ ID NO: 723 - DNA, 20 bp, Homo sapiens
tcctactcagactgttactc

SEQ ID NO: 724 - DNA, 20 bp, Homo sapiens
tactctggtgacacaacctg

SEQ ID NO: 725 - DNA, 20 bp, Homo sapiens
gcagtttccttagtaaccac

SEQ ID NO: 726 - DNA, 20 bp, Homo sapiens
gacacaacctgtggttacta

SEQ ID NO: 727 - DNA, 20 bp, Homo sapiens
tgtcaccagagtaacagtct

SEQ ID NO: 728 - DNA, 20 bp, Homo sapiens
aggttgtgtcaccagagtaa

SEQ ID NO: 729 - DNA, 20 bp, Homo sapiens
aaccacaggttgtgtcacca

SEQ ID NO: 730 - DNA, 20 bp, Homo sapiens
gtaaccacaggttgtgtcac

SEQ ID NO: 731 - DNA, 20 bp, Homo sapiens
atttatttttccttttattc

SEQ ID NO: 732 - DNA, 20 bp, Homo sapiens
tttccttttattctagttga

SEQ ID NO: 733 - DNA, 20 bp, Homo sapiens
tgattctgaattctttcaac

SEQ ID NO: 734 - DNA, 20 bp, Homo sapiens
aattctttcaactagaataa

SEQ ID NO: 735 - DNA, 20 bp, Homo sapiens
ttattctagttgaaagaatt

SEQ ID NO: 736 - DNA, 20 bp, Homo sapiens
tagttgaaagaattcagaat

SEQ ID NO: 737 - DNA, 20 bp, Homo sapiens
aattcagaatcagtgggatg

SEQ ID NO: 738 - DNA, 20 bp, Homo sapiens
attctttcaactagaataaa

SEQ ID NO: 739 - DNA, 20 bp, Homo sapiens
ttgaaagaattcagaatcag

SEQ ID NO: 740 - DNA, 20 bp, Homo sapiens
tgaaagaattcagaatcagt

SEQ ID NO: 741 - DNA, 20 bp, Homo sapiens
actgttgcctccggttctga

SEQ ID NO: 742 - DNA, 20 bp, Homo sapiens
cagatctgtcaaatcgcctg

SEQ ID NO: 743 - DNA, 20 bp, Homo sapiens
aaaacgccgccatttctcaa

SEQ ID NO: 744 - DNA, 20 bp, Homo sapiens
agatctgtcaaatcgcctgc

SEQ ID NO: 745 - DNA, 20 bp, Homo sapiens
tatggatcaagaaaaataga

SEQ ID NO: 746 - DNA, 20 bp, Homo sapiens
cgcctgcaggtaaaagcata

SEQ ID NO: 747 - DNA, 20 bp, Homo sapiens
atccatatgcttttacctgc

SEQ ID NO: 748 - DNA, 20 bp, Homo sapiens
ttgacagatctgttgagaaa

SEQ ID NO: 749 - DNA, 20 bp, Homo sapiens
acagatctgttgagaaatgg

SEQ ID NO: 750 - DNA, 20 bp, Homo sapiens
ggcgatttgacagatctgtt

SEQ ID NO: 751 - DNA, 20 bp, Homo sapiens
ggcgttttcattatgatata

SEQ ID NO: 752 - DNA, 20 bp, Homo sapiens
atgatataaagatatttaat

SEQ ID NO: 753 - DNA, 20 bp, Homo sapiens
gatatttaatcagtggctaa

SEQ ID NO: 754 - DNA, 20 bp, Homo sapiens
atttaatcagtggctaacag

SEQ ID NO: 755 - DNA, 20 bp, Homo sapiens
agaaactgttcagcttctgt

SEQ ID NO: 756 - DNA, 20 bp, Homo sapiens
gttttaaaatttttatatta

SEQ ID NO: 757 - DNA, 20 bp, Homo sapiens
ttttatattacagaatataa

SEQ ID NO: 758 - DNA, 20 bp, Homo sapiens
atattacagaatataaaaga

SEQ ID NO: 759 - DNA, 20 bp, Homo sapiens
gttcctgtaagataccaaaa

SEQ ID NO: 760 - DNA, 20 bp, Homo sapiens
ttgcctttttggtatcttac

SEQ ID NO: 761 - DNA, 20 bp, Homo sapiens
tggtatcttacaggaactcc

SEQ ID NO: 762 - DNA, 20 bp, Homo sapiens
atcttacaggaactccagga

SEQ ID NO: 763 - DNA, 20 bp, Homo sapiens
gccgctgcccaatgccatcc

SEQ ID NO: 764 - DNA, 20 bp, Homo sapiens
caggaactccaggatggcat

SEQ ID NO: 765 - DNA, 20 bp, Homo sapiens
aggaactccaggatggcatt

SEQ ID NO: 766 - DNA, 20 bp, Homo sapiens
tccaggatggcattgggcag

SEQ ID NO: 767 - DNA, 20 bp, Homo sapiens
gtcagaacattgaatgcaac

SEQ ID NO: 768 - DNA, 20 bp, Homo sapiens
agttcctgtaagataccaaa

SEQ ID NO: 769 - DNA, 20 bp, Homo sapiens
tgccatcctggagttcctgt

SEQ ID NO: 770 - DNA, 20 bp, Homo sapiens
ttggtatcttacaggaactc

SEQ ID NO: 771 - DNA, 20 bp, Homo sapiens
cgctgcccaatgccatcctg

SEQ ID NO: 772 - DNA, 20 bp, Homo sapiens
aactccaggatggcattggg

SEQ ID NO: 773 - DNA, 20 bp, Homo sapiens
gggcagcggcaaactgttgt

SEQ ID NO: 774 - DNA, 20 bp, Homo sapiens
agatctgtcaaatcgcctgc

SEQ ID NO: 775 - DNA, 20 bp, Homo sapiens
aatcctgcattgttgcctgt

SEQ ID NO: 776 - DNA, 20 bp, Homo sapiens
cgctgaagaaccctgatact

SEQ ID NO: 777 - DNA, 20 bp, Homo sapiens
gaacaaatatcccttagtat

SEQ ID NO: 778 - DNA, 20 bp, Homo sapiens
ctgtaagaacaaatatccct

SEQ ID NO: 779 - DNA, 20 bp, Homo sapiens
ctaagggatatttgttctta

SEQ ID NO: 780 - DNA, 20 bp, Homo sapiens
tgttcttacaggcaacaatg

SEQ ID NO: 781 - DNA, 20 bp, Homo sapiens
caacaatgcaggatttggaa

SEQ ID NO: 782 - DNA, 20 bp, Homo sapiens
acaatgcaggatttggaaca

SEQ ID NO: 783 - DNA, 20 bp, Homo sapiens
atttggaacagaggcgtccc

SEQ ID NO: 784 - DNA, 20 bp, Homo sapiens
acagaggcgtccccagttgg

SEQ ID NO: 785 - DNA, 20 bp, Homo sapiens
tatttttttattttgcattt

SEQ ID NO: 786 - DNA, 20 bp, Homo sapiens
ttattttgcattttagatga

SEQ ID NO: 787 - DNA, 20 bp, Homo sapiens
attttgcattttagatgaaa

SEQ ID NO: 788 - DNA, 20 bp, Homo sapiens
ttgcattttagatgaaagag

SEQ ID NO: 789 - DNA, 20 bp, Homo sapiens
atgaaagagaagatgttcaa

SEQ ID NO: 790 - RNA, 20 nt, Artificial Sequence
  source: /note="Description of Artificial Sequence: Synthetic oligonucleotide"
cuacucagacuguuacucug

SEQ ID NO: 791 - RNA, 20 nt, Artificial Sequence
  source: /note="Description of Artificial Sequence: Synthetic oligonucleotide"
cucagacuguuacucuggug

SEQ ID NO: 792 - RNA, 20 nt, Artificial Sequence
  source: /note="Description of Artificial Sequence: Synthetic oligonucleotide"
uuuugcaaaaacccaaaaua

SEQ ID NO: 793 - RNA, 20 nt, Artificial Sequence
  source: /note="Description of Artificial Sequence: Synthetic oligonucleotide"
aaaauauuuuagcuccuacu

SEQ ID NO: 794 - RNA, 20 nt, Artificial Sequence
  source: /note="Description of Artificial Sequence: Synthetic oligonucleotide"
aaauauuuuagcuccuacuc

SEQ ID NO: 795 - RNA, 20 nt, Artificial Sequence
  source: /note="Description of Artificial Sequence: Synthetic oligonucleotide"
acucagacuguuacucuggu

SEQ ID NO: 796 - RNA, 20 nt, Artificial Sequence
  source: /note="Description of Artificial Sequence: Synthetic oligonucleotide"
gaguaacagucugaguagga

SEQ ID NO: 797 - RNA, 20 nt, Artificial Sequence
  source: /note="Description of Artificial Sequence: Synthetic oligonucleotide"
cagguugugucaccagagua

SEQ ID NO: 798 - RNA, 20 nt, Artificial Sequence
  source: /note="Description of Artificial Sequence: Synthetic oligonucleotide"
gugguuacuaaggaaacugc

SEQ ID NO: 799 - RNA, 20 nt, Artificial Sequence
  source: /note="Description of Artificial Sequence: Synthetic oligonucleotide"
uaguaaccacagguuguguc

SEQ ID NO: 800 - RNA, 20 nt, Artificial Sequence
  source: /note="Description of Artificial Sequence: Synthetic oligonucleotide"
agacuguuacucuggugaca

SEQ ID NO: 801 - RNA, 20 nt, Artificial Sequence
  source: /note="Description of Artificial Sequence: Synthetic oligonucleotide"
uuacucuggugacacaaccu

SEQ ID NO: 802 - RNA, 20 nt, Artificial Sequence
  source: /note="Description of Artificial Sequence: Synthetic oligonucleotide"
uggugacacaaccugugguu

SEQ ID NO: 803 - RNA, 20 nt, Artificial Sequence
  source: /note="Description of Artificial Sequence: Synthetic oligonucleotide"
gugacacaaccugugguuac

SEQ ID NO: 804 - RNA, 20 nt, Artificial Sequence
  source: /note="Description of Artificial Sequence: Synthetic oligonucleotide"
gaauaaaaggaaaaauaaau

SEQ ID NO: 805 - RNA, 20 nt, Artificial Sequence
  source: /note="Description of Artificial Sequence: Synthetic oligonucleotide"
ucaacuagaauaaaaggaaa

SEQ ID NO: 806 - RNA, 20 nt, Artificial Sequence
  source: /note="Description of Artificial Sequence: Synthetic oligonucleotide"
guugaaagaauucagaauca

SEQ ID NO: 807 - RNA, 20 nt, Artificial Sequence
  source: /note="Description of Artificial Sequence: Synthetic oligonucleotide"
uuauucuaguugaaagaauu

SEQ ID NO: 808 - RNA, 20 nt, Artificial Sequence
  source: /note="Description of Artificial Sequence: Synthetic oligonucleotide"
aauucuuucaacuagaauaa

SEQ ID NO: 809 - RNA, 20 nt, Artificial Sequence
  source: /note="Description of Artificial Sequence: Synthetic oligonucleotide"
auucugaauucuuucaacua

SEQ ID NO: 810 - RNA, 20 nt, Artificial Sequence
  source: /note="Description of Artificial Sequence: Synthetic oligonucleotide"
caucccacugauucugaauu

SEQ ID NO: 811 - RNA, 20 nt, Artificial Sequence
  source: /note="Description of Artificial Sequence: Synthetic oligonucleotide"
uuuauucuaguugaaagaau

SEQ ID NO: 812 - RNA, 20 nt, Artificial Sequence
  source: /note="Description of Artificial Sequence: Synthetic oligonucleotide"
cugauucugaauucuuucaa

SEQ ID NO: 813 - RNA, 20 nt, Artificial Sequence
  source: /note="Description of Artificial Sequence: Synthetic oligonucleotide"
acugauucugaauucuuuca

SEQ ID NO: 814 - RNA, 20 nt, Artificial Sequence
  source: /note="Description of Artificial Sequence: Synthetic oligonucleotide"
ucagaaccggaggcaacagu

SEQ ID NO: 815 - RNA, 20 nt, Artificial Sequence
  source: /note="Description of Artificial Sequence: Synthetic oligonucleotide"
caggcgauuugacagaucug

SEQ ID NO: 816 - RNA, 20 nt, Artificial Sequence
  source: /note="Description of Artificial Sequence: Synthetic oligonucleotide"
uugagaaauggcggcguuuu

SEQ ID NO: 817 - RNA, 20 nt, Artificial Sequence
  source: /note="Description of Artificial Sequence: Synthetic oligonucleotide"
gcaggcgauuugacagaucu

SEQ ID NO: 818 - RNA, 20 nt, Artificial Sequence
  source: /note="Description of Artificial Sequence: Synthetic oligonucleotide"
ucuauuuuucuugauccaua

SEQ ID NO: 819 - RNA, 20 nt, Artificial Sequence
  source: /note="Description of Artificial Sequence: Synthetic oligonucleotide"
uaugcuuuuaccugcaggcg

SEQ ID NO: 820 - RNA, 20 nt, Artificial Sequence
  source: /note="Description of Artificial Sequence: Synthetic oligonucleotide"
gcagguaaaagcauauggau

SEQ ID NO: 821 - RNA, 20 nt, Artificial Sequence
  source: /note="Description of Artificial Sequence: Synthetic oligonucleotide"
uuucucaacagaucugucaa

SEQ ID NO: 822 - RNA, 20 nt, Artificial Sequence
  source: /note="Description of Artificial Sequence: Synthetic oligonucleotide"
ccauuucucaacagaucugu

SEQ ID NO: 823 - RNA, 20 nt, Artificial Sequence
  source: /note="Description of Artificial Sequence: Synthetic oligonucleotide"
aacagaucugucaaaucgcc

SEQ ID NO: 824 - RNA, 20 nt, Artificial Sequence
  source: /note="Description of Artificial Sequence: Synthetic oligonucleotide"
uauaucauaaugaaaacgcc

SEQ ID NO: 825 - RNA, 20 nt, Artificial Sequence
  source: /note="Description of Artificial Sequence: Synthetic oligonucleotide"
auuaaauaucuuuauaucau

SEQ ID NO: 826 - RNA, 20 nt, Artificial Sequence
  source: /note="Description of Artificial Sequence: Synthetic oligonucleotide"
uuagccacugauuaaauauc

SEQ ID NO: 827 - RNA, 20 nt, Artificial Sequence
  source: /note="Description of Artificial Sequence: Synthetic oligonucleotide"
cuguuagccacugauuaaau

SEQ ID NO: 828 - RNA, 20 nt, Artificial Sequence
  source: /note="Description of Artificial Sequence: Synthetic oligonucleotide"
acagaagcugaacaguuucu

SEQ ID NO: 829 - RNA, 20 nt, Artificial Sequence
  source: /note="Description of Artificial Sequence: Synthetic oligonucleotide"
uaauauaaaaauuuuaaaac

SEQ ID NO: 830 - RNA, 20 nt, Artificial Sequence
  source: /note="Description of Artificial Sequence: Synthetic oligonucleotide"
uuauauucuguaauauaaaa

SEQ ID NO: 831 - RNA, 20 nt, Artificial Sequence
  source: /note="Description of Artificial Sequence: Synthetic oligonucleotide"
ucuuuuauauucuguaauau

SEQ ID NO: 832 - RNA, 20 nt, Artificial Sequence
  source: /note="Description of Artificial Sequence: Synthetic oligonucleotide"
uuuugguaucuuacaggaac

SEQ ID NO: 833 - RNA, 20 nt, Artificial Sequence
  source: /note="Description of Artificial Sequence: Synthetic oligonucleotide"
guaagauaccaaaaaggcaa

SEQ ID NO: 834 - RNA, 20 nt, Artificial Sequence
  source: /note="Description of Artificial Sequence: Synthetic oligonucleotide"
ggaguuccuguaagauacca

SEQ ID NO: 835 - RNA, 20 nt, Artificial Sequence
  source: /note="Description of Artificial Sequence: Synthetic oligonucleotide"
uccuggaguuccuguaagau

SEQ ID NO: 836 - RNA, 20 nt, Artificial Sequence
  source: /note="Description of Artificial Sequence: Synthetic oligonucleotide"
ggauggcauugggcagcggc

SEQ ID NO: 837 - RNA, 20 nt, Artificial Sequence
  source: /note="Description of Artificial Sequence: Synthetic oligonucleotide"
augccauccuggaguuccug

SEQ ID NO: 838 - RNA, 20 nt, Artificial Sequence
  source: /note="Description of Artificial Sequence: Synthetic oligonucleotide"
aaugccauccuggaguuccu

SEQ ID NO: 839 - RNA, 20 nt, Artificial Sequence
  source: /note="Description of Artificial Sequence: Synthetic oligonucleotide"
cugcccaaugccauccugga

SEQ ID NO: 840 - RNA, 20 nt, Artificial Sequence
  source: /note="Description of Artificial Sequence: Synthetic oligonucleotide"
guugcauucaauguucugac

SEQ ID NO: 841 - RNA, 20 nt, Artificial Sequence
  source: /note="Description of Artificial Sequence: Synthetic oligonucleotide"
uuugguaucuuacaggaacu

SEQ ID NO: 842 - RNA, 20 nt, Artificial Sequence
  source: /note="Description of Artificial Sequence: Synthetic oligonucleotide"
acaggaacuccaggauggca

SEQ ID NO: 843 - RNA, 20 nt, Artificial Sequence
  source: /note="Description of Artificial Sequence: Synthetic oligonucleotide"
gaguuccuguaagauaccaa

SEQ ID NO: 844 - RNA, 20 nt, Artificial Sequence
  source: /note="Description of Artificial Sequence: Synthetic oligonucleotide"
caggauggcauugggcagcg

SEQ ID NO: 845 - RNA, 20 nt, Artificial Sequence
  source: /note="Description of Artificial Sequence: Synthetic oligonucleotide"
cccaaugccauccuggaguu

SEQ ID NO: 846 - RNA, 20 nt, Artificial Sequence
  source: /note="Description of Artificial Sequence: Synthetic oligonucleotide"
acaacaguuugccgcugccc

SEQ ID NO: 847 - RNA, 20 nt, Artificial Sequence
  source: /note="Description of Artificial Sequence: Synthetic oligonucleotide"
gcaggcgauuugacagaucu

SEQ ID NO: 848 - RNA, 20 nt, Artificial Sequence
  source: /note="Description of Artificial Sequence: Synthetic oligonucleotide"
acaggcaacaaugcaggauu

SEQ ID NO: 849 - RNA, 20 nt, Artificial Sequence
  source: /note="Description of Artificial Sequence: Synthetic oligonucleotide"
aguaucaggguucuucagcg

SEQ ID NO: 850 - RNA, 20 nt, Artificial Sequence
  source: /note="Description of Artificial Sequence: Synthetic oligonucleotide"
auacuaagggauauuuguuc

SEQ ID NO: 851 - RNA, 20 nt, Artificial Sequence
  source: /note="Description of Artificial Sequence: Synthetic oligonucleotide"
agggauauuuguucuuacag

SEQ ID NO: 852 - RNA, 20 nt, Artificial Sequence
  source: /note="Description of Artificial Sequence: Synthetic oligonucleotide"
uaagaacaaauaucccuuag

SEQ ID NO: 853 - RNA, 20 nt, Artificial Sequence
  source: /note="Description of Artificial Sequence: Synthetic oligonucleotide"
cauuguugccuguaagaaca

SEQ ID NO: 854 - RNA, 20 nt, Artificial Sequence
  source: /note="Description of Artificial Sequence: Synthetic oligonucleotide"
uuccaaauccugcauuguug

SEQ ID NO: 855 - RNA, 20 nt, Artificial Sequence
  source: /note="Description of Artificial Sequence: Synthetic oligonucleotide"
uguuccaaauccugcauugu

SEQ ID NO: 856 - RNA, 20 nt, Artificial Sequence
  source: /note="Description of Artificial Sequence: Synthetic oligonucleotide"
gggacgccucuguuccaaau

SEQ ID NO: 857 - RNA, 20 nt, Artificial Sequence
  source: /note="Description of Artificial Sequence: Synthetic oligonucleotide"
ccaacuggggacgccucugu

SEQ ID NO: 858 - RNA, 20 nt, Artificial Sequence
  source: /note="Description of Artificial Sequence: Synthetic oligonucleotide"
acagaggcguccccaguugg

SEQ ID NO: 859 - RNA, 20 nt, Artificial Sequence
  source: /note="Description of Artificial Sequence: Synthetic oligonucleotide"
ucaucuaaaaugcaaaauaa

SEQ ID NO: 860 - RNA, 20 nt, Artificial Sequence
  source: /note="Description of Artificial Sequence: Synthetic oligonucleotide"
uuucaucuaaaaugcaaaau

SEQ ID NO: 861 - RNA, 20 nt, Artificial Sequence
  source: /note="Description of Artificial Sequence: Synthetic oligonucleotide"
cucuuucaucuaaaaugcaa

SEQ ID NO: 862 - RNA, 20 nt, Artificial Sequence
  source: /note="Description of Artificial Sequence: Synthetic oligonucleotide"
uugaacaucuucucuuucau

SEQ ID NO: 863 - DNA, 20 bp, Canis lupus familiaris
caccagagtaacagtctgac

SEQ ID NO: 864 - RNA, 20 nt, Artificial Sequence
  source: /note="Description of Artificial Sequence: Synthetic oligonucleotide"
gucagacuguuacucuggug

SEQ ID NO: 865 - DNA, 8969 bp, Homo sapiens
actttccccctacaggactcagatctgggaggcaattaccttcggagaaaaacgaataggaaaaactgaagtgttactttttttaaagctgctgaagtttgttggtttctcattgtttttaagcctactggagcaataaagtttgaagaacttttaccaggttttttttatcgctgccttgatatacacttttcaaaatgctttggtgggaagaagtagaggactgttatgaaagagaagatgttcaaaagaaaacattcacaaaatgggtaaatgcacaattttctaagtttgggaagcagcatattgagaacctcttcagtgacctacaggatgggaggcgcctcctagacctcctcgaaggcctgacagggcaaaaactgccaaaagaaaaaggatccacaagagttcatgccctgaacaatgtcaacaaggcactgcgggttttgcagaacaataatgttgatttagtgaatattggaagtactgacatcgtagatggaaatcataaactgactcttggtttgatttggaatataatcctccactggcaggtcaaaaatgtaatgaaaaatatcatggctggattgcaacaaaccaacagtgaaaagattctcctgagctgggtccgacaatcaactcgtaattatccacaggttaatgtaatcaacttcaccaccagctggtctgatggcctggctttgaatgctctcatccatagtcataggccagacctatttgactggaatagtgtggtttgccagcagtcagccacacaacgactggaacatgcattcaacatcgccagatatcaattaggcatagagaaactactcgatcctgaagatgttgataccacctatccagataagaagtccatcttaatgtacatcacatcactcttccaagttttgcctcaacaagtgagcattgaagccatccaggaagtggaaatgttgccaaggccacctaaagtgactaaagaagaacattttcagttacatcatcaaatgcactattctcaacagatcacggtcagtctagcacagggatatgagagaacttcttcccctaagcctcgattcaagagctatgcctacacacaggctgcttatgtcaccacctctgaccctacacggagcccatttccttcacagcatttggaagctcctgaagacaagtcatttggcagttcattgatggagagtgaagtaaacctggaccgttatcaaacagctttagaagaagtattatcgtggcttctttctgctgaggacacattgcaagcacaaggagagatttctaatgatgtggaagtggtgaaagaccagtttcatactcatgaggggtacatgatggatttgacagcccatcagggccgggttggtaatattctacaattgggaagtaagctgattggaacaggaaaattatcagaagatgaagaaactgaagtacaagagcagatgaatctcctaaattcaagatgggaatgcctcagggtagctagcatggaaaaacaaagcaatttacatagagttttaatggatctccagaatcagaaactgaaagagttgaatgactggctaacaaaaacagaagaaagaacaaggaaaatggaggaagagcctcttggacctgatcttgaagacctaaaacgccaagtacaacaacataaggtgcttcaagaagatctagaacaagaacaagtcagggtcaattctctcactcacatggtggtggtagttgatgaatctagtggagatcacgcaactgctgctttggaagaacaacttaaggtattgggagatcgatgggcaaacatctgtagatggacagaagaccgctgggttcttttacaagacatccttctcaaatggcaacgtcttactgaagaacagtgcctttttagtgcatggctttcagaaaaagaagatgcagtgaacaagattcacacaactggctttaaagatcaaaatgaaatgttatcaagtcttcaaaaactggccgttttaaaagcggatctagaaaagaaaaagcaatccatgggcaaactgtattcactcaaacaagatcttctttcaacactgaagaataagtcagtgacccagaagacggaagcatggctggataactttgcccggtgttgggataatttagtccaaaaacttgaaaagagtacagcacagatttcacaggctgtcaccaccactcagccatcactaacacagacaactgtaatggaaacagtaactacggtgaccacaagggaacagatcctggtaaagcatgctcaagaggaacttccaccaccacctccccaaaagaagaggcagattactgtggattctgaaattaggaaaaggttggatgttgatataactgaacttcacagctggattactcgctcagaagctgtgttgcagagtcctgaatttgcaatctttcggaaggaaggcaacttctcagacttaaaagaaaaagtcaatgccatagagcgagaaaaagctgagaagttcagaaaactgcaagatgccagcagatcagctcaggccctggtggaacagatggtgaatgagggtgttaatgcagatagcatcaaacaagcctcagaacaactgaacagccggtggatcgaattctgccagttgctaagtgagagacttaactggctggagtatcagaacaacatcatcgctttctataatcagctacaacaattggagcagatgacaactactgctgaaaactggttgaaaatccaacccaccaccccatcagagccaacagcaattaaaagtcagttaaaaatttgtaaggatgaagtcaaccggctatcagatcttcaacctcaaattgaacgattaaaaattcaaagcatagccctgaaagagaaaggacaaggacccatgttcctggatgcagactttgtggcctttacaaatcattttaagcaagtcttttctgatgtgcaggccagagagaaagagctacagacaatttttgacactttgccaccaatgcgctatcaggagaccatgagtgccatcaggacatgggtccagcagtcagaaaccaaactctccatacctcaacttagtgtcaccgactatgaaatcatggagcagagactcggggaattgcaggctttacaaagttctctgcaagagcaacaaagtggcctatactatctcagcaccactgtgaaagagatgtcgaagaaagcgccctctgaaattagccggaaatatcaatcagaatttgaagaaattgagggacgctggaagaagctctcctcccagctggttgagcattgtcaaaagctagaggagcaaatgaataaactccgaaaaattcagaatcacatacaaaccctgaagaaatggatggctgaagttgatgtttttctgaaggaggaatggcctgcccttggggattcagaaattctaaaaaagcagctgaaacagtgcagacttttagtcagtgatattcagacaattcagcccagtctaaacagtgtcaatgaaggtgggcagaagataaagaatgaagcagagccagagtttgcttcgagacttgagacagaactcaaagaacttaacactcagtgggatcacatgtgccaacaggtctatgccagaaaggaggccttgaagggaggtttggagaaaactgtaagcctccagaaagatctatcagagatgcacgaatggatgacacaagctgaagaagagtatcttgagagagattttgaatataaaactccagatgaattacagaaagcagttgaagagatgaagagagctaaagaagaggcccaacaaaaagaagcgaaagtgaaactccttactgagtctgtaaatagtgtcatagctcaagctccacctgtagcacaagaggccttaaaaaaggaacttgaaactctaaccaccaactaccagtggctctgcactaggctgaatgggaaatgcaagactttggaagaagtttgggcatgttggcatgagttattgtcatacttggagaaagcaaacaagtggctaaatgaagtagaatttaaacttaaaaccactgaaaacattcctggcggagctgaggaaatctctgaggtgctagattcacttgaaaatttgatgcgacattcagaggataacccaaatcagattcgcatattggcacagaccctaacagatggcggagtcatggatgagctaatcaatgaggaacttgagacatttaattctcgttggagggaactacatgaagaggctgtaaggaggcaaaagttgcttgaacagagcatccagtctgcccaggagactgaaaaatccttacacttaatccaggagtccctcacattcattgacaagcagttggcagcttatattgcagacaaggtggacgcagctcaaatgcctcaggaagcccagaaaatccaatctgatttgacaagtcatgagatcagtttagaagaaatgaagaaacataatcaggggaaggaggctgcccaaagagtcctgtctcagattgatgttgcacagaaaaaattacaagatgtctccatgaagtttcgattattccagaaaccagccaattttgagcagcgtctacaagaaagtaagatgattttagatgaagtgaagatgcacttgcctgcattggaaacaaagagtgtggaacaggaagtagtacagtcacagctaaatcattgtgtgaacttgtataaaagtctgagtgaagtgaagtctgaagtggaaatggtgataaagactggacgtcagattgtacagaaaaagcagacggaaaatcccaaagaacttgatgaaagagtaacagctttgaaattgcattataatgagctgggagcaaaggtaacagaaagaaagcaacagttggagaaatgcttgaaattgtcccgtaagatgcgaaaggaaatgaatgtcttgacagaatggctggcagctacagatatggaattgacaaagagatcagcagttgaaggaatgcctagtaatttggattctgaagttgcctggggaaaggctactcaaaaagagattgagaaacagaaggtgcacctgaagagtatcacagaggtaggagaggccttgaaaacagttttgggcaagaaggagacgttggtggaagataaactcagtcttctgaatagtaactggatagctgtcacctcccgagcagaagagtggttaaatcttttgttggaataccagaaacacatggaaacttttgaccagaatgtggaccacatcacaaagtggatcattcaggctgacacacttttggatgaatcagagaaaaagaaaccccagcaaaaagaagacgtgcttaagcgtttaaaggcagaactgaatgacatacgcccaaaggtggactctacacgtgaccaagcagcaaacttgatggcaaaccgcggtgaccactgcaggaaattagtagagccccaaatctcagagctcaaccatcgatttgcagccatttcacacagaattaagactggaaaggcctccattcctttgaaggaattggagcagtttaactcagatatacaaaaattgcttgaaccactggaggctgaaattcagcagggggtgaatctgaaagaggaagacttcaataaagatatgaatgaagacaatgagggtactgtaaaagaattgttgcaaagaggagacaacttacaacaaagaatcacagatgagagaaagcgagaggaaataaagataaaacagcagctgttacagacaaaacataatgctctcaaggatttgaggtctcaaagaagaaaaaaggctctagaaatttctcatcagtggtatcagtacaagaggcaggctgatgatctcctgaaatgcttggatgacattgaaaaaaaattagccagcctacctgagcccagagatgaaaggaaaataaaggaaattgatcgggaattgcagaagaagaaagaggagctgaatgcagtgcgtaggcaagctgagggcttgtctgaggatggggccgcaatggcagtggagccaactcagatccagctcagcaagcgctggcgggaaattgagagcaaatttgctcagtttcgaagactcaactttgcacaaattcacactgtccgtgaagaaacgatgatggtgatgactgaagacatgcctttggaaatttcttatgtgccttctacttatttgactgaaatcactcatgtctcacaagccctattagaagtggaacaacttctcaatgctcctgacctctgtgctaaggactttgaagatctctttaagcaagaggagtctctgaagaatataaaagatagtctacaacaaagctcaggtcggattgacattattcatagcaagaagacagcagcattgcaaagtgcaacgcctgtggaaagggtgaagctacaggaagctctctcccagcttgatttccaatgggaaaaagttaacaaaatgtacaaggaccgacaagggcgatttgacagatctgttgagaaatggcggcgttttcattatgatataaagatatttaatcagtggctaacagaagctgaacagtttctcagaaagacacaaattcctgagaattgggaacatgctaaatacaaatggtatcttaagatctccgagaggcagaaaaaggggaactgtgcaacccttttgtccttctggatctcaaaatgaagggatacattctgctacatgaaatgtggaattaagaccatgatgcaacatgataaacaacacaaatttgggggtgtctctgtgctatacattattgaatttttccatgctatacactttttggatgtgtctgtgctatttattcagtttttttaaataaaagtttttgtagactaaattgccctctctactttgcatcgtttttgaacaaaggattttcaagactgataagctcaaatgtatcatttattgtattcaagtagcattcaatttttctttagaagtataatttgtagatattttaacacagaaaacttgcaacactgctcatgataggcacttattatatattttttgaaagactatatggataatgattctaactttgacttttcctgttttgccttcactttagaattaagcagagaatcaaatccatattcctgggggcgatgcttggacaacagtatctctttaaagatctttgtgtgagtcgaaggtgcagccagactgggagttattgtgaagaaacagattcaggaaggttgagaaacttgcctaaggctaatcagatagttactggcaatgttgtttctaaatcactgtttggctccctcattcaatgaatctacactatgtgggactgcctcttgctcctgacatcttttgctgctgaaataaatgaactcaaagcctagaaggtagaaaagagggagttcagaattatattcaggcacaaataccaataaggctattgcccccagaactgcaacttctcttggtttaacagataactatttagctgtgaggtacaactgaggaagtggacacacaagttatcaggagattctgatgtgccagtttatatttcttgtcacaggtaatgattcgaaatttcttaaaacagctgtcctcacagtggagtaacctgggagtacatgaaggcattccaaggagtaggcacagatagttttaagggaatttatttctagatcttctactttattttgtactcttcctgaaaactgaattgcctgaaaaaaaaaaaaaaaaaaaaaagacatctgtagtcaagacctcaggctgtttctcctttctaaccacttgccttttctaaccacttctcccaatttaagaaaaaaagccttatatttcatccaactctgatcttactaaggcttcaaacaaaagaagcatgaatgactttcatgacagggcaacatagctttttgcaagaagagtggttgctaactctttgctttcaactgaacccgaagagaagacctgataagttgtcagccgatagatcattaaaaatacgttttggtaagcaatcatcatgtacttttagcatatgccatagcaggagcacaaatgattaagcaatgctactataatacaattccttccgtttctttctactcacctatttgaataagatttttcatcatttacatctatacagacaaaaattagggatagaattgatgctgaagcctttccaattgtagaattaatttatattcttctgaaggtgtataaattgttaaatacccatccatcttattaagagatgtattttcaataaaattttatttttatgtttatcaaattttataatatacatatattgttttggtcaattgcacgttaataattgtaacaatacctcaattgaaaaggtttgttttttacatttaggacttacagtaacagaaaaaaaacactcattgtgtatacatactgtttaagaaaagtatactaggtgatcaataagattttttcaggcataaacatatatcttagttttaagatatcgatatttacaatgtccctcaaattatattattttcagtcatttaagaatgaaaagtacatttcgaatgcggattttaaatctgcaagggttgactcatttttcaagagtctttttaggggatacagaagcaagaatgtttggagttccctgatcagtatctttaagagaaggtatttgttggtagttcctagcaaattccaacagcctgatgctacttaaaagataatagtaattattttaaataatgcttctgataaaaaacattcatgcacactcagtttaaaaagatatttaaacatttgtagttgtagtttgggaactcatgatacaagtacagtctgtaaatgaagctcttagtttgcaaatatcagagataagctattaaaatgcagaaattgaaattgccctgatatatgcataaattagtgtcatctccatcttgtcagttagag

SEQ ID NO: 866 - protein, 2166 aa, Homo sapiens
MLWWEEVEDCYEREDVQKKTFTKWVNAQFSKFGKQHIENLFSDLQDGRRLLDLLEGLTGQKLPKEKGSTRVHALNNVNKALRVLQNNNVDLVNIGSTDIVDGNHKLTLGLIWNIILHWQVKNVMKNIMAGLQQTNSEKILLSWVRQSTRNYPQVNVINFTTSWSDGLALNALIHSHRPDLFDWNSVVCQQSATQRLEHAFNIARYQLGIEKLLDPEDVDTTYPDKKSILMYITSLFQVLPQQVSIEAIQEVEMLPRPPKVTKEEHFQLHHQMHYSQQITVSLAQGYERTSSPKPRFKSYAYTQAAYVTTSDPTRSPFPSQHLEAPEDKSFGSSLMESEVNLDRYQTALEEVLSWLLSAEDTLQAQGEISNDVEVVKDQFHTHEGYMMDLTAHQGRVGNILQLGSKLIGTGKLSEDEETEVQEQMNLLNSRWECLRVASMEKQSNLHRVLMDLQNQKLKELNDWLTKTEERTRKMEEEPLGPDLEDLKRQVQQHKVLQEDLEQEQVRVNSLTHMVVVVDESSGDHATAALEEQLKVLGDRWANICRWTEDRWVLLQDILLKWQRLTEEQCLFSAWLSEKEDAVNKIHTTGFKDQNEMLSSLQKLAVLKADLEKKKQSMGKLYSLKQDLLSTLKNKSVTQKTEAWLDNFARCWDNLVQKLEKSTAQISQAVTTTQPSLTQTTVMETVTTVTTREQILVKHAQEELPPPPPQKKRQITVDSEIRKRLDVDITELHSWITRSEAVLQSPEFAIFRKEGNFSDLKEKVNAIEREKAEKFRKLQDASRSAQALVEQMVNEGVNADSIKQASEQLNSRWIEFCQLLSERLNWLEYQNNIIAFYNQLQQLEQMTTTAENWLKIQPTTPSEPTAIKSQLKICKDEVNRLSDLQPQIERLKIQSIALKEKGQGPMFLDADFVAFTNHFKQVFSDVQAREKELQTIFDTLPPMRYQETMSAIRTWVQQSETKLSIPQLSVTDYEIMEQRLGELQALQSSLQEQQSGLYYLSTTVKEMSKKAPSEISRKYQSEFEEIEGRWKKLSSQLVEHCQKLEEQMNKLRKIQNHIQTLKKWMAEVDVFLKEEWPALGDSEILKKQLKQCRLLVSDIQTIQPSLNSVNEGGQKIKNEAEPEFASRLETELKELNTQWDHMCQQVYARKEALKGGLEKTVSLQKDLSEMHEWMTQAEEEYLERDFEYKTPDELQKAVEEMKRAKEEAQQKEAKVKLLTESVNSVIAQAPPVAQEALKKELETLTTNYQWLCTRLNGKCKTLEEVWACWHELLSYLEKANKWLNEVEFKLKTTENIPGGAEEISEVLDSLENLMRHSEDNPNQIRILAQTLTDGGVMDELINEELETFNSRWRELHEEAVRRQKLLEQSIQSAQETEKSLHLIQESLTFIDKQLAAYIADKVDAAQMPQEAQKIQSDLTSHEISLEEMKKHNQGKEAAQRVLSQIDVAQKKLQDVSMKFRLFQKPANFEQRLQESKMILDEVKMHLPALETKSVEQEVVQSQLNHCVNLYKSLSEVKSEVEMVIKTGRQIVQKKQTENPKELDERVTALKLHYNELGAKVTERKQQLEKCLKLSRKMRKEMNVLTEWLAATDMELTKRSAVEGMPSNLDSEVAWGKATQKEIEKQKVHLKSITEVGEALKTVLGKKETLVEDKLSLLNSNWIAVTSRAEEWLNLLLEYQKHMETFDQNVDHITKWIIQADTLLDESEKKKPQQKEDVLKRLKAELNDIRPKVDSTRDQAANLMANRGDHCRKLVEPQISELNHRFAAISHRIKTGKASIPLKELEQFNSDIQKLLEPLEAEIQQGVNLKEEDFNKDMNEDNEGTVKELLQRGDNLQQRITDERKREEIKIKQQLLQTKHNALKDLRSQRRKKALEISHQWYQYKRQADDLLKCLDDIEKKLASLPEPRDERKIKEIDRELQKKKEELNAVRRQAEGLSEDGAAMAVEPTQIQLSKRWREIESKFAQFRRLNFAQIHTVREETMMVMTEDMPLEISYVPSTYLTEITHVSQALLEVEQLLNAPDLCAKDFEDLFKQEESLKNIKDSLQQSSGRIDIIHSKKTAALQSATPVERVKLQEALSQLDFQWEKVNKMYKDRQGRFDRSVEKWRRFHYDIKIFNQWLTEAEQFLRKTQIPENWEHAKYKWYLKISERQKKGNCATLLSFWISK

SEQ ID NO: 867 - DNA, 6156 bp, Homo sapiens
actttccccctacaggactcagatctgggaggcaattaccttcggagaaaaacgaataggaaaaactgaagtgttactttttttaaagctgctgaagtttgttggtttctcattgtttttaagcctactggagcaataaagtttgaagaacttttaccaggttttttttatcgctgccttgatatacacttttcaaaatgctttggtgggaagaagtagaggactgttatgaaagagaagatgttcaaaagaaaacattcacaaaatgggtaaatgcacaattttctaagtttgggaagcagcatattgagaacctcttcagtgacctacaggatgggaggcgcctcctagacctcctcgaaggcctgacagggcaaaaactgccaaaagaaaaaggatccacaagagttcatgccctgaacaatgtcaacaaggcactgcgggttttgcagaacaataatgttgatttagtgaatattggaagtactgacatcgtagatggaaatcataaactgactcttggtttgatttggaatataatcctccactggcaggtcaaaaatgtaatgaaaaatatcatggctggattgcaacaaaccaacagtgaaaagattctcctgagctgggtccgacaatcaactcgtaattatccacaggttaatgtaatcaacttcaccaccagctggtctgatggcctggctttgaatgctctcatccatagtcataggccagacctatttgactggaatagtgtggtttgccagcagtcagccacacaacgactggaacatgcattcaacatcgccagatatcaattaggcatagagaaactactcgatcctgaagatgttgataccacctatccagataagaagtccatcttaatgtacatcacatcactcttccaagttttgcctcaacaagtgagcattgaagccatccaggaagtggaaatgttgccaaggccacctaaagtgactaaagaagaacattttcagttacatcatcaaatgcactattctcaacagatcacggtcagtctagcacagggatatgagagaacttcttcccctaagcctcgattcaagagctatgcctacacacaggctgcttatgtcaccacctctgaccctacacggagcccatttccttcacagcatttggaagctcctgaagacaagtcatttggcagttcattgatggagagtgaagtaaacctggaccgttatcaaacagctttagaagaagtattatcgtggcttctttctgctgaggacacattgcaagcacaaggagagatttctaatgatgtggaagtggtgaaagaccagtttcatactcatgaggggtacatgatggatttgacagcccatcagggccgggttggtaatattctacaattgggaagtaagctgattggaacaggaaaattatcagaagatgaagaaactgaagtacaagagcagatgaatctcctaaattcaagatgggaatgcctcagggtagctagcatggaaaaacaaagcaatttacatagagttttaatggatctccagaatcagaaactgaaagagttgaatgactggctaacaaaaacagaagaaagaacaaggaaaatggaggaagagcctcttggacctgatcttgaagacctaaaacgccaagtacaacaacataaggtgcttcaagaagatctagaacaagaacaagtcagggtcaattctctcactcacatggtggtggtagttgatgaatctagtggagatcacgcaactgctgctttggaagaacaacttaaggtattgggagatcgatgggcaaacatctgtagatggacagaagaccgctgggttcttttacaagacatccttctcaaatggcaacgtcttactgaagaacagtgcctttttagtgcatggctttcagaaaaagaagatgcagtgaacaagattcacacaactggctttaaagatcaaaatgaaatgttatcaagtcttcaaaaactggccgttttaaaagcggatctagaaaagaaaaagcaatccatgggcaaactgtattcactcaaacaagatcttctttcaacactgaagaataagtcagtgacccagaagacggaagcatggctggataactttgcccggtgttgggataatttagtccaaaaacttgaaaagagtacagcacagatttcacaggctgtcaccaccactcagccatcactaacacagacaactgtaatggaaacagtaactacggtgaccacaagggaacagatcctggtaaagcatgctcaagaggaacttccaccaccacctccccaaaagaagaggcagattactgtggattctgaaattaggaaaaggttggatgttgatataactgaacttcacagctggattactcgctcagaagctgtgttgcagagtcctgaatttgcaatctttcggaaggaaggcaacttctcagacttaaaagaaaaagtcaatgccatagagcgagaaaaagctgagaagttcagaaaactgcaagatgccagcagatcagctcaggccctggtggaacagatggtgaatgagggtgttaatgcagatagcatcaaacaagcctcagaacaactgaacagccggtggatcgaattctgccagttgctaagtgagagacttaactggctggagtatcagaacaacatcatcgctttctataatcagctacaacaattggagcagatgacaactactgctgaaaactggttgaaaatccaacccaccaccccatcagagccaacagcaattaaaagtcagttaaaaatttgtaaggatgaagtcaaccggctatcagatcttcaacctcaaattgaacgattaaaaattcaaagcatagccctgaaagagaaaggacaaggacccatgttcctggatgcagactttgtggcctttacaaatcattttaagcaagtcttttctgatgtgcaggccagagagaaagagctacagacaatttttgacactttgccaccaatgcgctatcaggagaccatgagtgccatcaggacatgggtccagcagtcagaaaccaaactctccatacctcaacttagtgtcaccgactatgaaatcatggagcagagactcggggaattgcaggctttacaaagttctctgcaagagcaacaaagtggcctatactatctcagcaccactgtgaaagagatgtcgaagaaagcgccctctgaaattagccggaaatatcaatcagaatttgaagaaattgagggacgctggaagaagctctcctcccagctggttgagcattgtcaaaagctagaggagcaaatgaataaactccgaaaaattcagaatcacatacaaaccctgaagaaatggatggctgaagttgatgtttttctgaaggaggaatggcctgcccttggggattcagaaattctaaaaaagcagctgaaacagtgcagacttttagtcagtgatattcagacaattcagcccagtctaaacagtgtcaatgaaggtgggcagaagataaagaatgaagcagagccagagtttgcttcgagacttgagacagaactcaaagaacttaacactcagtgggatcacatgtgccaacaggtctatgccagaaaggaggccttgaagggaggtttggagaaaactgtaagcctccagaaagatctatcagagatgcacgaatggatgacacaagctgaagaagagtatcttgagagagattttgaatataaaactccagatgaattacagaaagcagttgaagagatgaagagagctaaagaagaggcccaacaaaaagaagcgaaagtgaaactccttactgagtctgtaaatagtgtcatagctcaagctccacctgtagcacaagaggccttaaaaaaggaacttgaaactctaaccaccaactaccagtggctctgcactaggctgaatgggaaatgcaagactttggaagaagtttgggcatgttggcatgagttattgtcatacttggagaaagcaaacaagtggctaaatgaagtagaatttaaacttaaaaccactgaaaacattcctggcggagctgaggaaatctctgaggtgctagattcacttgaaaatttgatgcgacattcagaggataacccaaatcagattcgcatattggcacagaccctaacagatggcggagtcatggatgagctaatcaatgaggaacttgagacatttaattctcgttggagggaactacatgaagaggctgtaaggaggcaaaagttgcttgaacagagcatccagtctgcccaggagactgaaaaatccttacacttaatccaggagtccctcacattcattgacaagcagttggcagcttatattgcagacaaggtggacgcagctcaaatgcctcaggaagcccagaaaatccaatctgatttgacaagtcatgagatcagtttagaagaaatgaagaaacataatcaggggaaggaggctgcccaaagagtcctgtctcagattgatgttgcacagaaaaaattacaagatgtctccatgaagtttcgattattccagaaaccagccaattttgagcagcgtctacaagaaagtaagatgattttagatgaagtgaagatgcacttgcctgcattggaaacaaagagtgtggaacaggaagtagtacagtcacagctaaatcattgtgtgaacttgtataaaagtctgagtgaagtgaagtctgaagtggaaatggtgataaagactggacgtcagattgtacagaaaaagcagacggaaaatcccaaagaacttgatgaaagagtaacagctttgaaattgcattataatgagctgggagcaaaggtaacagaaagaaagcaacagttggagaaatgcttgaaattgtcccgtaagatgcgaaaggaaatgaatgtcttgacagaatggctggcagctacagatatggaattgacaaagagatcagcagttgaaggaatgcctagtaatttggattctgaagttgcctggggaaaggctactcaaaaagagattgagaaacagaaggtgcacctgaagagtatcacagaggtaggagaggccttgaaaacagttttgggcaagaaggagacgttggtggaagataaactcagtcttctgaatagtaactggatagctgtcacctcccgagcagaagagtggttaaatcttttgttggaataccagaaacacatggaaacttttgaccagaatgtggaccacatcacaaagtggatcattcaggctgacacacttttggatgaatcagagaaaaagaaaccccagcaaaaagaagacgtgcttaagcgtttaaaggcagaactgaatgacatacgcccaaaggtggactctacacgtgaccaagcagcaaacttgatggcaaaccgcggtgaccactgcaggaaattagtagagccccaaatctcagagctcaaccatcgatttgcagccatttcacacagaattaagactggaaaggcctccattcctttgaaggaattggagcagtttaactcagatatacaaaaattgcttgaaccactggaggctgaaattcagcagggggtgaatctgaaagaggaagacttcaataaagatatgaatgaagacaatgagggtactgtaaaagaattgttgcaaagaggagacaacttacaacaaagaatcacagatgagagaaagcgagaggaaataaagataaaacagcagctgttacagacaaaacataatgctctcaaggatttgaggtctcaaagaagaaaaaaggctctagaaatttctcatcagtggtatcagtacaagaggcaggctgatgatctcctgaaatgcttggatgacattgaaaaaaaattagccagcctacctgagcccagagatgaaaggaaaataaagatgaactaatgacttatcggtatatggacgacttcttactcatgttagcccattcatttcatcagagcatcttcacacatcagtgttcactctctatagatttatttgcatattgtctaaatatgtttttttctgttattattttacactttttattttgcttcattctctgttgagttcctcaaacctttaaaaaggaaataaataacttattcactta

SEQ ID NO: 868 - protein, 1915 aa, Homo sapiens
MLWWEEVEDCYEREDVQKKTFTKWVNAQFSKFGKQHIENLFSDLQDGRRLLDLLEGLTGQKLPKEKGSTRVHALNNVNKALRVLQNNNVDLVNIGSTDIVDGNHKLTLGLIWNIILHWQVKNVMKNIMAGLQQTNSEKILLSWVRQSTRNYPQVNVINFTTSWSDGLALNALIHSHRPDLFDWNSVVCQQSATQRLEHAFNIARYQLGIEKLLDPEDVDTTYPDKKSILMYITSLFQVLPQQVSIEAIQEVEMLPRPPKVTKEEHFQLHHQMHYSQQITVSLAQGYERTSSPKPRFKSYAYTQAAYVTTSDPTRSPFPSQHLEAPEDKSFGSSLMESEVNLDRYQTALEEVLSWLLSAEDTLQAQGEISNDVEVVKDQFHTHEGYMMDLTAHQGRVGNILQLGSKLIGTGKLSEDEETEVQEQMNLLNSRWECLRVASMEKQSNLHRVLMDLQNQKLKELNDWLTKTEERTRKMEEEPLGPDLEDLKRQVQQHKVLQEDLEQEQVRVNSLTHMVVVVDESSGDHATAALEEQLKVLGDRWANICRWTEDRWVLLQDILLKWQRLTEEQCLFSAWLSEKEDAVNKIHTTGFKDQNEMLSSLQKLAVLKADLEKKKQSMGKLYSLKQDLLSTLKNKSVTQKTEAWLDNFARCWDNLVQKLEKSTAQISQAVTTTQPSLTQTTVMETVTTVTTREQILVKHAQEELPPPPPQKKRQITVDSEIRKRLDVDITELHSWITRSEAVLQSPEFAIFRKEGNFSDLKEKVNAIEREKAEKFRKLQDASRSAQALVEQMVNEGVNADSIKQASEQLNSRWIEFCQLLSERLNWLEYQNNIIAFYNQLQQLEQMTTTAENWLKIQPTTPSEPTAIKSQLKICKDEVNRLSDLQPQIERLKIQSIALKEKGQGPMFLDADFVAFTNHFKQVFSDVQAREKELQTIFDTLPPMRYQETMSAIRTWVQQSETKLSIPQLSVTDYEIMEQRLGELQALQSSLQEQQSGLYYLSTTVKEMSKKAPSEISRKYQSEFEEIEGRWKKLSSQLVEHCQKLEEQMNKLRKIQNHIQTLKKWMAEVDVFLKEEWPALGDSEILKKQLKQCRLLVSDIQTIQPSLNSVNEGGQKIKNEAEPEFASRLETELKELNTQWDHMCQQVYARKEALKGGLEKTVSLQKDLSEMHEWMTQAEEEYLERDFEYKTPDELQKAVEEMKRAKEEAQQKEAKVKLLTESVNSVIAQAPPVAQEALKKELETLTTNYQWLCTRLNGKCKTLEEVWACWHELLSYLEKANKWLNEVEFKLKTTENIPGGAEEISEVLDSLENLMRHSEDNPNQIRILAQTLTDGGVMDELINEELETFNSRWRELHEEAVRRQKLLEQSIQSAQETEKSLHLIQESLTFIDKQLAAYIADKVDAAQMPQEAQKIQSDLTSHEISLEEMKKHNQGKEAAQRVLSQIDVAQKKLQDVSMKFRLFQKPANFEQRLQESKMILDEVKMHLPALETKSVEQEVVQSQLNHCVNLYKSLSEVKSEVEMVIKTGRQIVQKKQTENPKELDERVTALKLHYNELGAKVTERKQQLEKCLKLSRKMRKEMNVLTEWLAATDMELTKRSAVEGMPSNLDSEVAWGKATQKEIEKQKVHLKSITEVGEALKTVLGKKETLVEDKLSLLNSNWIAVTSRAEEWLNLLLEYQKHMETFDQNVDHITKWIIQADTLLDESEKKKPQQKEDVLKRLKAELNDIRPKVDSTRDQAANLMANRGDHCRKLVEPQISELNHRFAAISHRIKTGKASIPLKELEQFNSDIQKLLEPLEAEIQQGVNLKEEDFNKDMNEDNEGTVKELLQRGDNLQQRITDERKREEIKIKQQLLQTKHNALKDLRSQRRKKALEISHQWYQYKRQADDLLKCLDDIEKKLASLPEPRDERKIKMN

SEQ ID NO: 869 - protein, 2158 aa, Mus musculus
MWWVDCYRDVKKTTKWNASKGKHDNSDDGKRDGTGKKKGSTRVHANNVNKARVKNNVDVNGSTDVDGNHKTGWNHWVKNVMKTMAGTNSKSWVRSTRNYVNVNTSSWSDGANAHSHRDDWNSVVSHSATRHANAKCGKDDVATTYDKKSMYTSVVSAVMRTSSKVTRHHHMHYSTVSAGYTSSSKRKSYATAAYVATSDSTSYSHARDKSDSSMTVNDSYTAVSWSADTRAGSNDVVKHAHGMMDTSHGVGNVGSVGKGKSDAVMNNSRWCRVASMKSKHKVMDNKKDDWTKTRTKKMGDDKCVHKVDVRVNSTHMVVVVDSSGDHATAAKVGDRWANCRWTDRWVDKWHTCSTWSKDAMKNTSGKDNMMSSHKSTKDKKKTMKSSNDSAKNKSVTKMWMNARWDNTKKSSASAVTTTSTTTVMTVTMVTTRMVKHAKKRTVDSRKRDVDTHSWTRSAVSSAVYRKGNSDKVNAARKAKRKDASRSAAVMANGVNASRASNSRWTCSRVNWYTNTYNMTTTANKTSTTSTAKSKCKDVNRSAKSKKGGMDADVATNHNHDGVRAKKTDTMRYTMSSRTWSSKSVYSVTYMRGKASSKNGNYSDTVKMAKKASCKYSGHWKKSSVSCKHMNKRKNHKTKWMAVDVKWAGDAKKKCRVGDTSNSVNGGKKSAASRTRNTWDHCRVYTRKAKAGDKTVSKDSMHWMTAYRDYKTDTAVMKRAKAKTKVKTTVNSVAHASAAKKTTTNYWCTRNGKCKTVWACWHSYKANKWNVKKTMNVAGTVSNMHHSNNRATTDGGVMDNTNSRWRHAVRKKSSAKSHSDKAAYTDKVDAAMAKSDTSHSMKKHNGKDANRVSDVAKKDVSMKRKANRSKMDVKMHATKSVVSSHCVNYKSSVKSVMVKTGRVKKTNKDRVTAKHYNGAKVTRKKCKSRKMRKMNVTWAATDTTKRSAVGMSNDSVAWGKATKKKAHKSVTGSKMVGKKTVDKSNSNWAVTSRVWNYKHMTDNTKWHADDSKKKKDKRKAMNDMRKVDSTRDAAKMANRGDHCRKVVSNRRAASHRKTGKASKNSDKAGVNKDNKDMSDNGTVNRGDNRTDRKRKKTKHNAKDRSRRKKASHWYYKRADDKCDKKASRDRKKDRKKKNAVRRAGSNGAAMAVTSKRWRSNARRNAHTHTMVVTTDMDVSYVSTYTSHASVDHNTCAKDDKSKNKDNSGRDHKKKTAASATSMKVKVAVAMDGKHRMYKRGRDRSVKWRHHYDMKVNWNVKKTNNWHAKYKWYKDGGRAVVRTNATGSSKTDVNKGSSRWHDCKARRKRKNVSRDNVWADNATGDKVKARGKNTGGAVVSARDKKKKTNWKVSRAKGVHKDRDHWSRNYNSAGDKVTVHGKADVRSKGHYKKSTVKRKDRSWAVNHRRTKDRAGSTTGASASTVTVTSVVTKTVSKMSSVAADNRAWTTDWSDRVKSRVMVGDDNMKKATDRRTAANKNKTSNARTTDRRWDVNRRNMKDSTWAKAVGVRGKDSWKGHTVDAKKTTKAKDRRSVDVANDAKRDYSADDTRKVHMTNNTSWGNHKRVSAATHRDKSWTATTANVDASRKKDSRGVRMKWDGTHTDYHNDNGKRSGSDARRDNMNKWSKKSNRSHASSDWKRHSVWKDDSRAGGDAVKNDHRAKRKTKVMSTTVRTGKYRRANVTRRKAVNAWDKNRSADWRKDARAADDKRAVKGSWVGDDSDHKVKARGAKNVNRVNDAHTTGSYNSTDNTRWRVAVDRVRHAHRDGASHSTSVGWRASNKVYYNHTTTCWDHKMTYSADNNVRSAYRTAMKRRKACDSSAACDADHNKNDMDNCTTYDRHNNVNVCVDMCNWNVYDTGRTGRRVSKTGSCKAHDKYRYKVASSTGCDRRGHDSRGVASGGSNSVRSCANNKAADWMRSMVWVHRVAAATAKHAKCNCKCGRYRSKHNYDCSCSGRVAKGHKMHYMVYCTTTSGDVRDAKVKNKRTKRYAKHRMGYVTVGDNMTVTNWVDSAASSSHDDTHSRHYASRAMNSNGSYNDSSNSDDHHYCSNDSSRSASSRGRADNRNAYDRKHHKGSSMMTSSRDAAAKRHKGRARMDHNKSHRRAAKVNGTTVSSSTSRSDSSMRVVGSTSSMGDSDTSTGVMNNSSSRGRNAGKMRDTM

SEQ ID NO: 870 - protein, 1307 aa, Acidaminococcus sp. BV3L6
MTQFEGFTNLYQVSKTLRFELIPQGKTLKHIQEQGFIEEDKARNDHYKELKPIIDRIYKTYADQCLQLVQLDWENLSAAIDSYRKEKTEETRNALIEEQATYRNAIHDYFIGRTDNLTDAINKRHAEIYKGLFKAELFNGKVLKQLGTVTTTEHENALLRSFDKFTTYFSGFYENRKNVFSAEDISTAIPHRIVQDNFPKFKENCHIFTRLITAVPSLREHFENVKKAIGIFVSTSIEEVFSFPFYNQLLTQTQIDLYNQLLGGISREAGTEKIKGLNEVLNLAIQKNDETAHIIASLPHRFIPLFKQILSDRNTLSFILEEFKSDEEVIQSFCKYKTLLRNENVLETAEALFNELNSIDLTHIFISHKKLETISSALCDHWDTLRNALYERRISELTGKITKSAKEKVQRSLKHEDINLQEIISAAGKELSEAFKQKTSEILSHAHAALDQPLPTTLKKQEEKEILKSQLDSLLGLYHLLDWFAVDESNEVDPEFSARLTGIKLEMEPSLSFYNKARNYATKKPYSVEKFKLNFQMPTLASGWDVNKEKNNGAILFVKNGLYYLGIMPKQKGRYKALSFEPTEKTSEGFDKMYYDYFPDAAKMIPKCSTQLKAVTAHFQTHTTPILLSNNFIEPLEITKEIYDLNNPEKEPKKFQTAYAKKTGDQKGYREALCKWIDFTRDFLSKYTKTTSIDLSSLRPSSQYKDLGEYYAELNPLLYHISFQRIAEKEIMDAVETGKLYLFQIYNKDFAKGHHGKPNLHTLYWTGLFSPENLAKTSIKLNGQAELFYRPKSRMKRMAHRLGEKMLNKKLKDQKTPIPDTLYQELYDYVNHRLSHDLSDEARALLPNVITKEVSHEIIKDRRFTSDKFFFHVPITLNYQAANSPSKFNQRVNAYLKEHPETPIIGIDRGERNLIYITVIDSTGKILEQRSLNTIQQFDYQKKLDNREKERVAARQAWSVVGTIKDLKQGYLSQVIHEIVDLMIHYQAVVVLENLNFGFKSKRTGIAEKAVYQQFEKMLIDKLNCLVLKDYPAEKVGGVLNPYQLTDQFTSFAKMGTQSGFLFYVPAPYTSKIDPLTGFVDPFVWKTIKNHESRKHFLEGFDFLHYDVKTGDFILHFKMNRNLSFQRGLPGFMPAWDIVFEKNETQFDAKGTPFIAGKRIVPVIENHRFTGRYRDLYPANELIALLEEKGIVFRDGSNILPKLLENDDSHAIDTMVALIRSVLQMRNSNAATGEDYINSPVRDLNGVCFDSRFQNPEWPMDADANGAYHIALKGQLLLNHLKESKDLKLQNGISNQDWLAYIQELRN

SEQ ID NO: 871 - protein, 1228 aa, Lachnospiraceae bacterium ND2006
AASKLEKFTNCYSLSKTLRFKAIPVGKTQENIDNKRLLVEDEKRAEDYKGVKKLLDRYYLSFINDVLHSIKLKNLNNYISLFRKKTRTEKENKELENLEINLRKEIAKAFKGAAGYKSLFKKDIIETILPEAADDKDEIALVNSFNGFTTAFTGFFDNRENMFSEEAKSTSIAFRCINENLTRYISNMDIFEKVDAIFDKHEVQEIKEKILNSDYDVEDFFEGEFFNFVLTQEGIDVYNAIIGGFVTESGEKIKGLNEYINLYNAKTKQALPKFKPLYKQVLSDRESLSFYGEGYTSDEEVLEVFRNTLNKNSEIFSSIKKLEKLFKNFDEYSSAGIFVKNGPAISTISKDIFGEWNLIRDKWNAEYDDIHLKKKAVVTEKYEDDRRKSFKKIGSFSLEQLQEYADADLSVVEKLKEIIIQKVDEIYKVYGSSEKLFDADFVLEKSLKKNDAVVAIMKDLLDSVKSFENYIKAFFGEGKETNRDESFYGDFVLAYDILLKVDHIYDAIRNYVTQKPYSKDKFKLYFQNPQFMGGWDKDKETDYRATILRYGSKYYLAIMDKKYAKCLQKIDKDDVNGNYEKINYKLLPGPNKMLPKVFFSKKWMAYYNPSEDIQKIYKNGTFKKGDMFNLNDCHKLIDFFKDSISRYPKWSNAYDFNFSETEKYKDIAGFYREVEEQGYKVSFESASKKEVDKLVEEGKLYMFQIYNKDFSDKSHGTPNLHTMYFKLLFDENNHGQIRLSGGAELFMRRASLKKEELVVHPANSPIANKNPDNPKKTTTLSYDVYKDKRFSEDQYELHIPIAINKCPKNIFKINTEVRVLLKHDDNPYVIGIDRGERNLLYIVVVDGKGNIVEQYSLNEIINNFNGIRIKTDYHSLLDKKEKERFEARQNWTSIENIKELKAGYISQVVHKICELVEKYDAVIALEDLNSGFKNSRVKVEKQVYQKFEKMLIDKLNYMVDKKSNPCATGGALKGYQITNKFESFKSMSTQNGFIFYIPAWLTSKIDPSTGFVNLLKTKYTSIADSKKFISSFDRIMYVPEEDLFEFALDYKNFSRTDADYIKKWKLYSYGNRIRIFAAAKKNNVFAWEEVCLTSAYKELFNKYGINYQQGDIRALLCEQSDKAFYSSFMALMSLMLQMRNSITGRTDVDFLISPVKNSDGIFYDSRNYEAQENAILPKNADANGAYNIARKVLWAIGQFKKAEDEKLDKVKIAISNKEWLEYAQTSVK

SEQ ID NO: 872 - DNA, 4101 bp, Streptococcus pyogenes
gacaagaagtacagcatcggcctggacatcggcaccaactctgtgggctgggccgtgatcaccgacgagtacaaggtgcccagcaagaaattcaaggtgctgggcaacaccgaccggcacagcatcaagaagaacctgatcggagccctgctgttcgacagcggcgaaacagccgaggccacccggctgaagagaaccgccagaagaagatacaccagacggaagaaccggatctgctatctgcaagagatcttcagcaacgagatggccaaggtggacgacagcttcttccacagactggaagagtccttcctggtggaagaggataagaagcacgagcggcaccccatcttcggcaacatcgtggacgaggtggcctaccacgagaagtaccccaccatctaccacctgagaaagaaactggtggacagcaccgacaaggccgacctgcggctgatctatctggccctggcccacatgatcaagttccggggccacttcctgatcgagggcgacctgaaccccgacaacagcgacgtggacaagctgttcatccagctggtgcagacctacaaccagctgttcgaggaaaaccccatcaacgccagcggcgtggacgccaaggccatcctgtctgccagactgagcaagagcagacggctggaaaatctgatcgcccagctgcccggcgagaagaagaatggcctgttcggcaacctgattgccctgagcctgggcctgacccccaacttcaagagcaacttcgacctggccgaggatgccaaactgcagctgagcaaggacacctacgacgacgacctggacaacctgctggcccagatcggcgaccagtacgccgacctgtttctggccgccaagaacctgtccgacgccatcctgctgagcgacatcctgagagtgaacaccgagatcaccaaggcccccctgagcgcctctatgatcaagagatacgacgagcaccaccaggacctgaccctgctgaaagctctcgtgcggcagcagctgcctgagaagtacaaagagattttcttcgaccagagcaagaacggctacgccggctacattgacggcggagccagccaggaagagttctacaagttcatcaagcccatcctggaaaagatggacggcaccgaggaactgctcgtgaagctgaacagagaggacctgctgcggaagcagcggaccttcgacaacggcagcatcccccaccagatccacctgggagagctgcacgccattctgcggcggcaggaagatttttacccattcctgaaggacaaccgggaaaagatcgagaagatcctgaccttccgcatcccctactacgtgggccctctggccaggggaaacagcagattcgcctggatgaccagaaagagcgaggaaaccatcaccccctggaacttcgaggaagtggtggacaagggcgcttccgcccagagcttcatcgagcggatgaccaacttcgataagaacctgcccaacgagaaggtgctgcccaagcacagcctgctgtacgagtacttcaccgtgtataacgagctgaccaaagtgaaatacgtgaccgagggaatgagaaagcccgccttcctgagcggcgagcagaaaaaggccatcgtggacctgctgttcaagaccaaccggaaagtgaccgtgaagcagctgaaagaggactacttcaagaaaatcgagtgcttcgactccgtggaaatctccggcgtggaagatcggttcaacgcctccctgggcacataccacgatctgctgaaaattatcaaggacaaggacttcctggacaatgaggaaaacgaggacattctggaagatatcgtgctgaccctgacactgtttgaggacagagagatgatcgaggaacggctgaaaacctatgcccacctgttcgacgacaaagtgatgaagcagctgaagcggcggagatacaccggctggggcaggctgagccggaagctgatcaacggcatccgggacaagcagtccggcaagacaatcctggatttcctgaagtccgacggcttcgccaacagaaacttcatgcagctgatccacgacgacagcctgacctttaaagaggacatccagaaagcccaggtgtccggccagggcgatagcctgcacgagcacattgccaatctggccggcagccccgccattaagaagggcatcctgcagacagtgaaggtggtggacgagctcgtgaaagtgatgggccggcacaagcccgagaacatcgtgatcgaaatggccagagagaaccagaccacccagaagggacagaagaacagccgcgagagaatgaagcggatcgaagagggcatcaaagagctgggcagccagatcctgaaagaacaccccgtggaaaacacccagctgcagaacgagaagctgtacctgtactacctgcagaatgggcgggatatgtacgtggaccaggaactggacatcaaccggctgtccgactacgatgtggaccatatcgtgcctcagagctttctgaaggacgactccatcgacaacaaggtgctgaccagaagcgacaagaaccggggcaagagcgacaacgtgccctccgaagaggtcgtgaagaagatgaagaactactggcggcagctgctgaacgccaagctgattacccagagaaagttcgacaatctgaccaaggccgagagaggcggcctgagcgaactggataaggccggcttcatcaagagacagctggtggaaacccggcagatcacaaagcacgtggcacagatcctggactcccggatgaacactaagtacgacgagaatgacaagctgatccgggaagtgaaagtgatcaccctgaagtccaagctggtgtccgatttccggaaggatttccagttttacaaagtgcgcgagatcaacaactaccaccacgcccacgacgcctacctgaacgccgtcgtgggaaccgccctgatcaaaaagtaccctaagctggaaagcgagttcgtgtacggcgactacaaggtgtacgacgtgcggaagatgatcgccaagagcgagcaggaaatcggcaaggctaccgccaagtacttcttctacagcaacatcatgaactttttcaagaccgagattaccctggccaacggcgagatccggaagcggcctctgatcgagacaaacggcgaaaccggggagatcgtgtgggataagggccgggattttgccaccgtgcggaaagtgctgagcatgccccaagtgaatatcgtgaaaaagaccgaggtgcagacaggcggcttcagcaaagagtctatcctgcccaagaggaacagcgataagctgatcgccagaaagaaggactgggaccctaagaagtacggcggcttcgacagccccaccgtggcctattctgtgctggtggtggccaaagtggaaaagggcaagtccaagaaactgaagagtgtgaaagagctgctggggatcaccatcatggaaagaagcagcttcgagaagaatcccatcgactttctggaagccaagggctacaaagaagtgaaaaaggacctgatcatcaagctgcctaagtactccctgttcgagctggaaaacggccggaagagaatgctggcctctgccggcgaactgcagaagggaaacgaactggccctgccctccaaatatgtgaacttcctgtacctggccagccactatgagaagctgaagggctcccccgaggataatgagcagaaacagctgtttgtggaacagcacaagcactacctggacgagatcatcgagcagatcagcgagttctccaagagagtgatcctggccgacgctaatctggacaaagtgctgtccgcctacaacaagcaccgggataagcccatcagagagcaggccgagaatatcatccacctgtttaccctgaccaatctgggagcccctgccgccttcaagtactttgacaccaccatcgaccggaagaggtacaccagcaccaaagaggtgctggacgccaccctgatccaccagagcatcaccggcctgtacgagacacggatcgacctgtctcagctgggaggcgac

SEQ ID NO: 873 - protein, 1053 aa, Staphylococcus aureus
MKRNYILGLDIGITSVGYGIIDYETRDVIDAGVRLFKEANVENNEGRRSKRGARRLKRRRRHRIQRVKKLLFDYNLLTDHSELSGINPYEARVKGLSQKLSEEEFSAALLHLAKRRGVHNVNEVEEDTGNELSTKEQISRNSKALEEKYVAELQLERLKKDGEVRGSINRFKTSDYVKEAKQLLKVQKAYHQLDQSFIDTYIDLLETRRTYYEGPGEGSPFGWKDIKEWYEMLMGHCTYFPEELRSVKYAYNADLYNALNDLNNLVITRDENEKLEYYEKFQIIENVFKQKKKPTLKQIAKEILVNEEDIKGYRVTSTGKPEFTNLKVYHDIKDITARKEIIENAELLDQIAKILTIYQSSEDIQEELTNLNSELTQEEIEQISNLKGYTGTHNLSLKAINLILDELWHTNDNQIAIFNRLKLVPKKVDLSQQKEIPTTLVDDFILSPVVKRSFIQSIKVINAIIKKYGLPNDIIIELAREKNSKDAQKMINEMQKRNRQTNERIEEIIRTTGKENAKYLIEKIKLHDMQEGKCLYSLEAIPLEDLLNNPFNYEVDHIIPRSVSFDNSFNNKVLVKQEENSKKGNRTPFQYLSSSDSKISYETFKKHILNLAKGKGRISKTKKEYLLEERDINRFSVQKDFINRNLVDTRYATRGLMNLLRSYFRVNNLDVKVKSINGGFTSFLRRKWKFKKERNKGYKHHAEDALIIANADFIFKEWKKLDKAKKVMENQMFEEKQAESMPEIETEQEYKEIFITPHQIKHIKDFKDYKYSHRVDKKPNRELINDTLYSTRKDDKGNTLIVNNLNGLYDKDNDKLKKLINKSPEKLLMYHHDPQTYQKLKLIMEQYGDEKNPLYKYYEETGNYLTKYSKKDNGPVIKKIKYYGNKLNAHLDITDDYPNSRNKVVKLSLKPYRFDVYLDNGVYKFVTVKNLDVIKKENYYEVNSKCYEEAKKLKKISNQAEFIASFYNNDLIKINGELYRVIGVNNDLLNRIEVNMIDITYREYLENMNDKRPPRIIKTIASKTQSIKKYSTDILGNLYEVKSKKHPQIIKKG

SEQ ID NO: 874 - DNA, 450 bp, Artificial Sequence
  source: /note="Description of Artificial Sequence: Synthetic polynucleotide"
ctagactagcatgctgcccatgtaaggaggcaaggcctggggacacccgagatgcctggttataattaacccagacatgtggctgcccccccccccccaacacctgctgcctctaaaaataaccctgcatgccatgttcccggcgaagggccagctgtcccccgccagctagactcagcacttagtttaggaaccagtgagcaagtcagcccttggggcagcccatacaaggccatggggctgggcaagctgcacgcctgggtccggggtgggcacggtgcccgggcaacgagctgaaagctcatctgctctcaggggcccctccctggggacagcccctcctggctagtcacaccctgtaggctcctctatataacccaggggcacaggggctgccctcattctaccaccacctccacagcacagacagacactcaggagccagccagc

SEQ ID NO: 875 - DNA, 436 bp, Artificial Sequence
  source: /note="Description of Artificial Sequence: Synthetic polynucleotide"
tgcccatgtaaggaggcaaggcctggggacacccgagatgcctggttataattaacccagacatgtggctgcccccccccccccaacacctgctgcctctaaaaataaccctgcatgccatgttcccggcgaagggccagctgtcccccgccagctagactcagcacttagtttaggaaccagtgagcaagtcagcccttggggcagcccatacaaggccatggggctgggcaagctgcacgcctgggtccggggtgggcacggtgcccgggcaacgagctgaaagctcatctgctctcaggggcccctccctggggacagcccctcctggctagtcacaccctgtaggctcctctatataacccaggggcacaggggctgccctcattctaccaccacctccacagcacagacagacactcaggagccagccagc

SEQ ID NO: 876-879 - skipped (4 entries)

SEQ ID NO: 880 - DNA, 115 bp, Artificial Sequence
  source: /note="Description of Artificial Sequence: Synthetic polynucleotide"
ggccactccctctctgcgcgctcgctcgctcactgaggccgggcgaccaaaggtcgcccgacgcccgggctttgcccgggcggcctcagtgagcgagcgagcgcgcagagaggga

SEQ ID NO: 881 - DNA, 141 bp, Artificial Sequence
  source: /note="Description of Artificial Sequence: Synthetic polynucleotide"
cctgcaggcagctgcgcgctcgctcgctcactgaggccgcccgggcaaagcccgggcgtcgggcgacctttggtcgcccggcctcagtgagcgagcgagcgcgcagagagggagtggccaactccatcactaggggttcct

SEQ ID NO: 882 - DNA, 141 bp, Artificial Sequence
  source: /note="Description of Artificial Sequence: Synthetic polynucleotide"
aggaacccctagtgatggagttggccactccctctctgcgcgctcgctcgctcactgaggccgggcgaccaaaggtcgcccgacgcccgggctttgcccgggcggcctcagtgagcgagcgagcgcgcagctgcctgcagg

SEQ ID NO: 883 - DNA, 141 bp, Artificial Sequence
  source: /note="Description of Artificial Sequence: Synthetic polynucleotide"
ccactccctctatgcgcgctcgctcactcactcggccctggagaccaaaggtctccagactgccggcctctggccggcagggccgagtgagtgagcgagcgcgcatagagggagtgggtacctccatcatctaggtttgcc

SEQ ID NO: 884 - protein, 9 aa, Unknown
  source: /note="Description of Unknown: c-myc NLS sequence"
PAAKRVKLD

SEQ ID NO: 885 - DNA, 51 bp, Simian virus 40
atggccccaaagaagaagcggaaggtcggtatccacggagtcccagcagcc

SEQ ID NO: 886 - protein, 42 aa, Homo sapiens
GNYNNQSSNFGPMKGGNFGGRSSGPYGGGGQYFAKPRNQGGY

SEQ ID NO: 887 - DNA, 48 bp, Unknown
  source: /note="Description of Unknown: Nucleoplasmin NLS sequence"
aagcgtcctgctgctactaagaaagctggtcaagctaagaaaaagaaa

SEQ ID NO: 888 - protein, 41 aa, Unknown
  source: /note="Description of Unknown: IBB domain from importin-alpha sequence"
RMRKFKNKGKDTAELRRRRVEVSVELRKAKKDEQILKRRNV

SEQ ID NO: 889 - protein, 8 aa, Unknown
  source: /note="Description of Unknown: Myoma T protein sequence"
VSRKRPRP

SEQ ID NO: 890 - protein, 8 aa, Unknown
  source: /note="Description of Unknown: Myoma T protein sequence"
PPKKARED

SEQ ID NO: 891 - protein, 8 aa, Homo sapiens
PQPKKKPL

SEQ ID NO: 892 - protein, 12 aa, Mus musculus
SALIKKKKKMAP

SEQ ID NO: 893 - protein, 5 aa, Influenza virus
DRLRR

SEQ ID NO: 894 - protein, 6 aa, Influenza virus
KQKKRK

SEQ ID NO: 895 - protein, 10 aa, Hepatitis delta virus
RKLKKKIKKL

SEQ ID NO: 896 - protein, 10 aa, Mus musculus
REKKKFLKRR

SEQ ID NO: 897 - protein, 20 aa, Homo sapiens
KRKGDEVDGVDEVAKKKSKK

SEQ ID NO: 898 - protein, 17 aa, Homo sapiens
RKCLQAGMNLEARKTKK

SEQ ID NO: 899 - DNA, 5133 bp, Artificial Sequence
  source: /note="Description of Artificial Sequence: Synthetic polynucleotide"
ggccactccctctctgcgcgctcgctcgctcactgaggccgggcgaccaaaggtcgcccgacgcccgggctttgcccgggcggcctcagtgagcgagcgagcgcgcagagagggagtggccaactccatcactaggggttccttgtagttaatgattaacccgccatgctacttatctacgtagccatgctctagattaattaatgcccatgtaaggaggcaaggcctggggacacccgagatgcctggttataattaacccagacatgtggctgcccccccccccccaacacctgctgcctctaaaaataaccctgcatgccatgttcccggcgaagggccagctgtcccccgccagctagactcagcacttagtttaggaaccagtgagcaagtcagcccttggggcagcccatacaaggccatggggctgggcaagctgcacgcctgggtccggggtgggcacggtgcccgggcaacgagctgaaagctcatctgctctcaggggcccctccctggggacagcccctcctggctagtcacaccctgtaggctcctctatataacccaggggcacaggggctgccctcattctaccaccacctccacagcacagacagacactcaggagccagccagcgctagcgccaccatgatggccccaaagaagaagcggaaggtcggtatccacggagtcccagcagccgacaagaagtacagcatcggcctggacatcggcaccaactctgtgggctgggccgtgatcaccgacgagtacaaggtgcccagcaagaaattcaaggtgctgggcaacaccgaccggcacagcatcaagaagaacctgatcggagccctgctgttcgacagcggcgaaacagccgaggccacccggctgaagagaaccgccagaagaagatacaccagacggaagaaccggatctgctatctgcaagagatcttcagcaacgagatggccaaggtggacgacagcttcttccacagactggaagagtccttcctggtggaagaggataagaagcacgagcggcaccccatcttcggcaacatcgtggacgaggtggcctaccacgagaagtaccccaccatctaccacctgagaaagaaactggtggacagcaccgacaaggccgacctgcggctgatctatctggccctggcccacatgatcaagttccggggccacttcctgatcgagggcgacctgaaccccgacaacagcgacgtggacaagctgttcatccagctggtgcagacctacaaccagctgttcgaggaaaaccccatcaacgccagcggcgtggacgccaaggccatcctgtctgccagactgagcaagagcagacggctggaaaatctgatcgcccagctgcccggcgagaagaagaatggcctgttcggcaacctgattgccctgagcctgggcctgacccccaacttcaagagcaacttcgacctggccgaggatgccaaactgcagctgagcaaggacacctacgacgacgacctggacaacctgctggcccagatcggcgaccagtacgccgacctgtttctggccgccaagaacctgtccgacgccatcctgctgagcgacatcctgagagtgaacaccgagatcaccaaggcccccctgagcgcctctatgatcaagagatacgacgagcaccaccaggacctgaccctgctgaaagctctcgtgcggcagcagctgcctgagaagtacaaagagattttcttcgaccagagcaagaacggctacgccggctacattgacggcggagccagccaggaagagttctacaagttcatcaagcccatcctggaaaagatggacggcaccgaggaactgctcgtgaagctgaacagagaggacctgctgcggaagcagcggaccttcgacaacggcagcatcccccaccagatccacctgggagagctgcacgccattctgcggcggcaggaagatttttacccattcctgaaggacaaccgggaaaagatcgagaagatcctgaccttccgcatcccctactacgtgggccctctggccaggggaaacagcagattcgcctggatgaccagaaagagcgaggaaaccatcaccccctggaacttcgaggaagtggtggacaagggcgcttccgcccagagcttcatcgagcggatgaccaacttcgataagaacctgcccaacgagaaggtgctgcccaagcacagcctgctgtacgagtacttcaccgtgtataacgagctgaccaaagtgaaatacgtgaccgagggaatgagaaagcccgccttcctgagcggcgagcagaaaaaggccatcgtggacctgctgttcaagaccaaccggaaagtgaccgtgaagcagctgaaagaggactacttcaagaaaatcgagtgcttcgactccgtggaaatctccggcgtggaagatcggttcaacgcctccctgggcacataccacgatctgctgaaaattatcaaggacaaggacttcctggacaatgaggaaaacgaggacattctggaagatatcgtgctgaccctgacactgtttgaggacagagagatgatcgaggaacggctgaaaacctatgcccacctgttcgacgacaaagtgatgaagcagctgaagcggcggagatacaccggctggggcaggctgagccggaagctgatcaacggcatccgggacaagcagtccggcaagacaatcctggatttcctgaagtccgacggcttcgccaacagaaacttcatgcagctgatccacgacgacagcctgacctttaaagaggacatccagaaagcccaggtgtccggccagggcgatagcctgcacgagcacattgccaatctggccggcagccccgccattaagaagggcatcctgcagacagtgaaggtggtggacgagctcgtgaaagtgatgggccggcacaagcccgagaacatcgtgatcgaaatggccagagagaaccagaccacccagaagggacagaagaacagccgcgagagaatgaagcggatcgaagagggcatcaaagagctgggcagccagatcctgaaagaacaccccgtggaaaacacccagctgcagaacgagaagctgtacctgtactacctgcagaatgggcgggatatgtacgtggaccaggaactggacatcaaccggctgtccgactacgatgtggaccatatcgtgcctcagagctttctgaaggacgactccatcgacaacaaggtgctgaccagaagcgacaagaaccggggcaagagcgacaacgtgccctccgaagaggtcgtgaagaagatgaagaactactggcggcagctgctgaacgccaagctgattacccagagaaagttcgacaatctgaccaaggccgagagaggcggcctgagcgaactggataaggccggcttcatcaagagacagctggtggaaacccggcagatcacaaagcacgtggcacagatcctggactcccggatgaacactaagtacgacgagaatgacaagctgatccgggaagtgaaagtgatcaccctgaagtccaagctggtgtccgatttccggaaggatttccagttttacaaagtgcgcgagatcaacaactaccaccacgcccacgacgcctacctgaacgccgtcgtgggaaccgccctgatcaaaaagtaccctaagctggaaagcgagttcgtgtacggcgactacaaggtgtacgacgtgcggaagatgatcgccaagagcgagcaggaaatcggcaaggctaccgccaagtacttcttctacagcaacatcatgaactttttcaagaccgagattaccctggccaacggcgagatccggaagcggcctctgatcgagacaaacggcgaaaccggggagatcgtgtgggataagggccgggattttgccaccgtgcggaaagtgctgagcatgccccaagtgaatatcgtgaaaaagaccgaggtgcagacaggcggcttcagcaaagagtctatcctgcccaagaggaacagcgataagctgatcgccagaaagaaggactgggaccctaagaagtacggcggcttcgacagccccaccgtggcctattctgtgctggtggtggccaaagtggaaaagggcaagtccaagaaactgaagagtgtgaaagagctgctggggatcaccatcatggaaagaagcagcttcgagaagaatcccatcgactttctggaagccaagggctacaaagaagtgaaaaaggacctgatcatcaagctgcctaagtactccctgttcgagctggaaaacggccggaagagaatgctggcctctgccggcgaactgcagaagggaaacgaactggccctgccctccaaatatgtgaacttcctgtacctggccagccactatgagaagctgaagggctcccccgaggataatgagcagaaacagctgtttgtggaacagcacaagcactacctggacgagatcatcgagcagatcagcgagttctccaagagagtgatcctggccgacgctaatctggacaaagtgctgtccgcctacaacaagcaccgggataagcccatcagagagcaggccgagaatatcatccacctgtttaccctgaccaatctgggagcccctgccgccttcaagtactttgacaccaccatcgaccggaagaggtacaccagcaccaaagaggtgctggacgccaccctgatccaccagagcatcaccggcctgtacgagacacggatcgacctgtctcagctgggaggcgacaagcgtcctgctgctactaagaaagctggtcaagctaagaaaaagaaatgaatcgattagcaataaaggatcgtttattttcattggaagcgtgtgttggttttttgatcaggcgcgggtaccaggtcgcggccgctctagagcatggctacgtagataagtagcatggcgggttaatcattaactacaaggaacccctagtgatggagttggccactccctctctgcgcgctcgctcgctcactgaggccgggcgaccaaaggtcgcccgacgcccgggctttgcccgggcggcctcagtgagcgagcgagcgcgcagagaggga

SEQ ID NO: 900 - DNA, 5185 bp, Artificial Sequence
  source: /note="Description of Artificial Sequence: Synthetic polynucleotide"
cctgcaggcagctgcgcgctcgctcgctcactgaggccgcccgggcaaagcccgggcgtcgggcgacctttggtcgcccggcctcagtgagcgagcgagcgcgcagagagggagtggccaactccatcactaggggttcctgtggccaactccatcactaggggttccttgtagttaatgattaacccgccatgctacttatctacgtagccatgctctagattaattaatgcccatgtaaggaggcaaggcctggggacacccgagatgcctggttataattaacccagacatgtggctgcccccccccccccaacacctgctgcctctaaaaataaccctgcatgccatgttcccggcgaagggccagctgtcccccgccagctagactcagcacttagtttaggaaccagtgagcaagtcagcccttggggcagcccatacaaggccatggggctgggcaagctgcacgcctgggtccggggtgggcacggtgcccgggcaacgagctgaaagctcatctgctctcaggggcccctccctggggacagcccctcctggctagtcacaccctgtaggctcctctatataacccaggggcacaggggctgccctcattctaccaccacctccacagcacagacagacactcaggagccagccagcgctagcgccaccatgatggccccaaagaagaagcggaaggtcggtatccacggagtcccagcagccgacaagaagtacagcatcggcctggacatcggcaccaactctgtgggctgggccgtgatcaccgacgagtacaaggtgcccagcaagaaattcaaggtgctgggcaacaccgaccggcacagcatcaagaagaacctgatcggagccctgctgttcgacagcggcgaaacagccgaggccacccggctgaagagaaccgccagaagaagatacaccagacggaagaaccggatctgctatctgcaagagatcttcagcaacgagatggccaaggtggacgacagcttcttccacagactggaagagtccttcctggtggaagaggataagaagcacgagcggcaccccatcttcggcaacatcgtggacgaggtggcctaccacgagaagtaccccaccatctaccacctgagaaagaaactggtggacagcaccgacaaggccgacctgcggctgatctatctggccctggcccacatgatcaagttccggggccacttcctgatcgagggcgacctgaaccccgacaacagcgacgtggacaagctgttcatccagctggtgcagacctacaaccagctgttcgaggaaaaccccatcaacgccagcggcgtggacgccaaggccatcctgtctgccagactgagcaagagcagacggctggaaaatctgatcgcccagctgcccggcgagaagaagaatggcctgttcggcaacctgattgccctgagcctgggcctgacccccaacttcaagagcaacttcgacctggccgaggatgccaaactgcagctgagcaaggacacctacgacgacgacctggacaacctgctggcccagatcggcgaccagtacgccgacctgtttctggccgccaagaacctgtccgacgccatcctgctgagcgacatcctgagagtgaacaccgagatcaccaaggcccccctgagcgcctctatgatcaagagatacgacgagcaccaccaggacctgaccctgctgaaagctctcgtgcggcagcagctgcctgagaagtacaaagagattttcttcgaccagagcaagaacggctacgccggctacattgacggcggagccagccaggaagagttctacaagttcatcaagcccatcctggaaaagatggacggcaccgaggaactgctcgtgaagctgaacagagaggacctgctgcggaagcagcggaccttcgacaacggcagcatcccccaccagatccacctgggagagctgcacgccattctgcggcggcaggaagatttttacccattcctgaaggacaaccgggaaaagatcgagaagatcctgaccttccgcatcccctactacgtgggccctctggccaggggaaacagcagattcgcctggatgaccagaaagagcgaggaaaccatcaccccctggaacttcgaggaagtggtggacaagggcgcttccgcccagagcttcatcgagcggatgaccaacttcgataagaacctgcccaacgagaaggtgctgcccaagcacagcctgctgtacgagtacttcaccgtgtataacgagctgaccaaagtgaaatacgtgaccgagggaatgagaaagcccgccttcctgagcggcgagcagaaaaaggccatcgtggacctgctgttcaagaccaaccggaaagtgaccgtgaagcagctgaaagaggactacttcaagaaaatcgagtgcttcgactccgtggaaatctccggcgtggaagatcggttcaacgcctccctgggcacataccacgatctgctgaaaattatcaaggacaaggacttcctggacaatgaggaaaacgaggacattctggaagatatcgtgctgaccctgacactgtttgaggacagagagatgatcgaggaacggctgaaaacctatgcccacctgttcgacgacaaagtgatgaagcagctgaagcggcggagatacaccggctggggcaggctgagccggaagctgatcaacggcatccgggacaagcagtccggcaagacaatcctggatttcctgaagtccgacggcttcgccaacagaaacttcatgcagctgatccacgacgacagcctgacctttaaagaggacatccagaaagcccaggtgtccggccagggcgatagcctgcacgagcacattgccaatctggccggcagccccgccattaagaagggcatcctgcagacagtgaaggtggtggacgagctcgtgaaagtgatgggccggcacaagcccgagaacatcgtgatcgaaatggccagagagaaccagaccacccagaagggacagaagaacagccgcgagagaatgaagcggatcgaagagggcatcaaagagctgggcagccagatcctgaaagaacaccccgtggaaaacacccagctgcagaacgagaagctgtacctgtactacctgcagaatgggcgggatatgtacgtggaccaggaactggacatcaaccggctgtccgactacgatgtggaccatatcgtgcctcagagctttctgaaggacgactccatcgacaacaaggtgctgaccagaagcgacaagaaccggggcaagagcgacaacgtgccctccgaagaggtcgtgaagaagatgaagaactactggcggcagctgctgaacgccaagctgattacccagagaaagttcgacaatctgaccaaggccgagagaggcggcctgagcgaactggataaggccggcttcatcaagagacagctggtggaaacccggcagatcacaaagcacgtggcacagatcctggactcccggatgaacactaagtacgacgagaatgacaagctgatccgggaagtgaaagtgatcaccctgaagtccaagctggtgtccgatttccggaaggatttccagttttacaaagtgcgcgagatcaacaactaccaccacgcccacgacgcctacctgaacgccgtcgtgggaaccgccctgatcaaaaagtaccctaagctggaaagcgagttcgtgtacggcgactacaaggtgtacgacgtgcggaagatgatcgccaagagcgagcaggaaatcggcaaggctaccgccaagtacttcttctacagcaacatcatgaactttttcaagaccgagattaccctggccaacggcgagatccggaagcggcctctgatcgagacaaacggcgaaaccggggagatcgtgtgggataagggccgggattttgccaccgtgcggaaagtgctgagcatgccccaagtgaatatcgtgaaaaagaccgaggtgcagacaggcggcttcagcaaagagtctatcctgcccaagaggaacagcgataagctgatcgccagaaagaaggactgggaccctaagaagtacggcggcttcgacagccccaccgtggcctattctgtgctggtggtggccaaagtggaaaagggcaagtccaagaaactgaagagtgtgaaagagctgctggggatcaccatcatggaaagaagcagcttcgagaagaatcccatcgactttctggaagccaagggctacaaagaagtgaaaaaggacctgatcatcaagctgcctaagtactccctgttcgagctggaaaacggccggaagagaatgctggcctctgccggcgaactgcagaagggaaacgaactggccctgccctccaaatatgtgaacttcctgtacctggccagccactatgagaagctgaagggctcccccgaggataatgagcagaaacagctgtttgtggaacagcacaagcactacctggacgagatcatcgagcagatcagcgagttctccaagagagtgatcctggccgacgctaatctggacaaagtgctgtccgcctacaacaagcaccgggataagcccatcagagagcaggccgagaatatcatccacctgtttaccctgaccaatctgggagcccctgccgccttcaagtactttgacaccaccatcgaccggaagaggtacaccagcaccaaagaggtgctggacgccaccctgatccaccagagcatcaccggcctgtacgagacacggatcgacctgtctcagctgggaggcgacaagcgtcctgctgctactaagaaagctggtcaagctaagaaaaagaaatgaatcgattagcaataaaggatcgtttattttcattggaagcgtgtgttggttttttgatcaggcgcgggtaccaggtcgcggccgctctagagcatggctacgtagataagtagcatggcgggttaatcattaactacaaggaacccctagtgatggagttaggaacccctagtgatggagttggccactccctctctgcgcgctcgctcgctcactgaggccgggcgaccaaaggtcgcccgacgcccgggctttgcccgggcggcctcagtgagcgagcgagcgcgcagctgcctgcagg

SEQ ID NO: 901 - DNA, 6909 bp, Artificial Sequence
  source: /note="Description of Artificial Sequence: Synthetic polynucleotide"
aagatgacggtttgtcacatggagttggcaggatgtttgattaaaaacataacaggaagaaaaatgccccgctgtgggcggacaaaatagttgggaactgggaggggtggaaatggagtttttaaggattatttagggaagagtgacaaaatagatgggaactgggtgtagcgtcgtaagctaatacgaaaattaaaaatgacaaaatagtttggaactagatttcacttatctggttcggatctcctaggcgatatcagtgatcacggatctcgaccaattgacattattgaagcaactagtatcgattttatcagggttattgtctcagacctgcaggcagctgcgcgctcgctcgctcactgaggccgcccgggcaaagcccgggcgtcgggcgacctttggtcgcccggcctcagtgagcgagcgagcgcgcagagagggagtggccaactccatcactaggggttcctgtggccaactccatcactaggggttccttgtagttaatgattaacccgccatgctacttatctacgtagccatgctctagattaattaatgcccatgtaaggaggcaaggcctggggacacccgagatgcctggttataattaacccagacatgtggctgcccccccccccccaacacctgctgcctctaaaaataaccctgcatgccatgttcccggcgaagggccagctgtcccccgccagctagactcagcacttagtttaggaaccagtgagcaagtcagcccttggggcagcccatacaaggccatggggctgggcaagctgcacgcctgggtccggggtgggcacggtgcccgggcaacgagctgaaagctcatctgctctcaggggcccctccctggggacagcccctcctggctagtcacaccctgtaggctcctctatataacccaggggcacaggggctgccctcattctaccaccacctccacagcacagacagacactcaggagccagccagcgctagcgccaccatgatggccccaaagaagaagcggaaggtcggtatccacggagtcccagcagccgacaagaagtacagcatcggcctggacatcggcaccaactctgtgggctgggccgtgatcaccgacgagtacaaggtgcccagcaagaaattcaaggtgctgggcaacaccgaccggcacagcatcaagaagaacctgatcggagccctgctgttcgacagcggcgaaacagccgaggccacccggctgaagagaaccgccagaagaagatacaccagacggaagaaccggatctgctatctgcaagagatcttcagcaacgagatggccaaggtggacgacagcttcttccacagactggaagagtccttcctggtggaagaggataagaagcacgagcggcaccccatcttcggcaacatcgtggacgaggtggcctaccacgagaagtaccccaccatctaccacctgagaaagaaactggtggacagcaccgacaaggccgacctgcggctgatctatctggccctggcccacatgatcaagttccggggccacttcctgatcgagggcgacctgaaccccgacaacagcgacgtggacaagctgttcatccagctggtgcagacctacaaccagctgttcgaggaaaaccccatcaacgccagcggcgtggacgccaaggccatcctgtctgccagactgagcaagagcagacggctggaaaatctgatcgcccagctgcccggcgagaagaagaatggcctgttcggcaacctgattgccctgagcctgggcctgacccccaacttcaagagcaacttcgacctggccgaggatgccaaactgcagctgagcaaggacacctacgacgacgacctggacaacctgctggcccagatcggcgaccagtacgccgacctgtttctggccgccaagaacctgtccgacgccatcctgctgagcgacatcctgagagtgaacaccgagatcaccaaggcccccctgagcgcctctatgatcaagagatacgacgagcaccaccaggacctgaccctgctgaaagctctcgtgcggcagcagctgcctgagaagtacaaagagattttcttcgaccagagcaagaacggctacgccggctacattgacggcggagccagccaggaagagttctacaagttcatcaagcccatcctggaaaagatggacggcaccgaggaactgctcgtgaagctgaacagagaggacctgctgcggaagcagcggaccttcgacaacggcagcatcccccaccagatccacctgggagagctgcacgccattctgcggcggcaggaagatttttacccattcctgaaggacaaccgggaaaagatcgagaagatcctgaccttccgcatcccctactacgtgggccctctggccaggggaaacagcagattcgcctggatgaccagaaagagcgaggaaaccatcaccccctggaacttcgaggaagtggtggacaagggcgcttccgcccagagcttcatcgagcggatgaccaacttcgataagaacctgcccaacgagaaggtgctgcccaagcacagcctgctgtacgagtacttcaccgtgtataacgagctgaccaaagtgaaatacgtgaccgagggaatgagaaagcccgccttcctgagcggcgagcagaaaaaggccatcgtggacctgctgttcaagaccaaccggaaagtgaccgtgaagcagctgaaagaggactacttcaagaaaatcgagtgcttcgactccgtggaaatctccggcgtggaagatcggttcaacgcctccctgggcacataccacgatctgctgaaaattatcaaggacaaggacttcctggacaatgaggaaaacgaggacattctggaagatatcgtgctgaccctgacactgtttgaggacagagagatgatcgaggaacggctgaaaacctatgcccacctgttcgacgacaaagtgatgaagcagctgaagcggcggagatacaccggctggggcaggctgagccggaagctgatcaacggcatccgggacaagcagtccggcaagacaatcctggatttcctgaagtccgacggcttcgccaacagaaacttcatgcagctgatccacgacgacagcctgacctttaaagaggacatccagaaagcccaggtgtccggccagggcgatagcctgcacgagcacattgccaatctggccggcagccccgccattaagaagggcatcctgcagacagtgaaggtggtggacgagctcgtgaaagtgatgggccggcacaagcccgagaacatcgtgatcgaaatggccagagagaaccagaccacccagaagggacagaagaacagccgcgagagaatgaagcggatcgaagagggcatcaaagagctgggcagccagatcctgaaagaacaccccgtggaaaacacccagctgcagaacgagaagctgtacctgtactacctgcagaatgggcgggatatgtacgtggaccaggaactggacatcaaccggctgtccgactacgatgtggaccatatcgtgcctcagagctttctgaaggacgactccatcgacaacaaggtgctgaccagaagcgacaagaaccggggcaagagcgacaacgtgccctccgaagaggtcgtgaagaagatgaagaactactggcggcagctgctgaacgccaagctgattacccagagaaagttcgacaatctgaccaaggccgagagaggcggcctgagcgaactggataaggccggcttcatcaagagacagctggtggaaacccggcagatcacaaagcacgtggcacagatcctggactcccggatgaacactaagtacgacgagaatgacaagctgatccgggaagtgaaagtgatcaccctgaagtccaagctggtgtccgatttccggaaggatttccagttttacaaagtgcgcgagatcaacaactaccaccacgcccacgacgcctacctgaacgccgtcgtgggaaccgccctgatcaaaaagtaccctaagctggaaagcgagttcgtgtacggcgactacaaggtgtacgacgtgcggaagatgatcgccaagagcgagcaggaaatcggcaaggctaccgccaagtacttcttctacagcaacatcatgaactttttcaagaccgagattaccctggccaacggcgagatccggaagcggcctctgatcgagacaaacggcgaaaccggggagatcgtgtgggataagggccgggattttgccaccgtgcggaaagtgctgagcatgccccaagtgaatatcgtgaaaaagaccgaggtgcagacaggcggcttcagcaaagagtctatcctgcccaagaggaacagcgataagctgatcgccagaaagaaggactgggaccctaagaagtacggcggcttcgacagccccaccgtggcctattctgtgctggtggtggccaaagtggaaaagggcaagtccaagaaactgaagagtgtgaaagagctgctggggatcaccatcatggaaagaagcagcttcgagaagaatcccatcgactttctggaagccaagggctacaaagaagtgaaaaaggacctgatcatcaagctgcctaagtactccctgttcgagctggaaaacggccggaagagaatgctggcctctgccggcgaactgcagaagggaaacgaactggccctgccctccaaatatgtgaacttcctgtacctggccagccactatgagaagctgaagggctcccccgaggataatgagcagaaacagctgtttgtggaacagcacaagcactacctggacgagatcatcgagcagatcagcgagttctccaagagagtgatcctggccgacgctaatctggacaaagtgctgtccgcctacaacaagcaccgggataagcccatcagagagcaggccgagaatatcatccacctgtttaccctgaccaatctgggagcccctgccgccttcaagtactttgacaccaccatcgaccggaagaggtacaccagcaccaaagaggtgctggacgccaccctgatccaccagagcatcaccggcctgtacgagacacggatcgacctgtctcagctgggaggcgacaagcgtcctgctgctactaagaaagctggtcaagctaagaaaaagaaatgaatcgattagcaataaaggatcgtttattttcattggaagcgtgtgttggttttttgatcaggcgcgggtaccaggtcgcggccgctctagagcatggctacgtagataagtagcatggcgggttaatcattaactacaaggaacccctagtgatggagttaggaacccctagtgatggagttggccactccctctctgcgcgctcgctcgctcactgaggccgggcgaccaaaggtcgcccgacgcccgggctttgcccgggcggcctcagtgagcgagcgagcgcgcagctgcctgcaggcatgcaagctgtagccaaccactagaactatagctagagtcctgggcgaacaaacgatgctcgccttccagaaaaccgaggatgcgaaccacttcatccggggtcagcaccaccggcaagcgccgcgacggccgaggtcttccgatctcctgaagccagggcagatccgtgcacagcaccttgccgtagaagaacagcaaggccgccaatgcctgacgatgcgtggagaccgaaaccttgcgctcgttcgccagccaggacagaaatgcctcgacttcgctgctgcccaaggttgccgggtgacgcacaccgtggaaacggatgaaggcacgaacccagttgacataagcctgttcggttcgtaaactgtaatgcaagtagcgtatgcgctcacgcaactggtccagaaccttgaccgaacgcagcggtggtaacggcgcagtggcggttttcatggcttgttatgactgtttttttgtacagtctatgcctcgggcatccaagcagcaagcgcgttacgccgtgggtcgatgtttgatgttatggagcagcaacgatgttacgcagcagcaacgatgttacgcagcagggcagtcgccctaaaacaaagttaggtggctcaagtatgggcatcattcgcacatgtaggctcggccctgaccaagtcaaatccatgcgggctgctcttgatcttttcggtcgtgagttcggagacgtagccacctactcccaacatcagccggactccgattacctcgggaacttgctccgtagtaagacattcatcgcgcttgctgccttcgaccaagaagcggttgttggcgctctcgcggcttacgttctgcccaagtttgagcagccgcgtagtgagatctatatctatgatctcgcagtctccggcgagcaccggaggcagggcattgccaccgcgctcatcaatctcctcaagcatgaggccaacgcgcttggtgcttatgtgatctacgtgcaagcagattacggtgacgatcccgcagtggctctctatacaaagttgggcatacgggaagaagtgatgcactttgatatcgacccaagtaccgccacctaacaattcgttcaagccgagatcggcttcccggccgcggagttgttcggtaaattgtcacaacgccgcgaatatagtctttaccatgcccttggccacgcccctctttaatacgacgggcaatttgcacttcagaaaatgaagagtttgctttagccataacaaaagtccagtatgctttttcacagcataactggactgatttcagtttacaactattctgtctagtttaagactttattgtcatagtttagatctattttgttcagtttaagactttattgtccgcccacacccgcttacgc

SEQ ID NO: 902 - DNA, 6857 bp, Artificial Sequence
  source: /note="Description of Artificial Sequence: Synthetic polynucleotide"
aagatgacggtttgtcacatggagttggcaggatgtttgattaaaaacataacaggaagaaaaatgccccgctgtgggcggacaaaatagttgggaactgggaggggtggaaatggagtttttaaggattatttagggaagagtgacaaaatagatgggaactgggtgtagcgtcgtaagctaatacgaaaattaaaaatgacaaaatagtttggaactagatttcacttatctggttcggatctcctaggcgatatcagtgatcacggatctcgaccaattgacattattgaagcaactagtatcgattttatcagggttattgtctcagaggccactccctctctgcgcgctcgctcgctcactgaggccgggcgaccaaaggtcgcccgacgcccgggctttgcccgggcggcctcagtgagcgagcgagcgcgcagagagggagtggccaactccatcactaggggttccttgtagttaatgattaacccgccatgctacttatctacgtagccatgctctagattaattaatgcccatgtaaggaggcaaggcctggggacacccgagatgcctggttataattaacccagacatgtggctgcccccccccccccaacacctgctgcctctaaaaataaccctgcatgccatgttcccggcgaagggccagctgtcccccgccagctagactcagcacttagtttaggaaccagtgagcaagtcagcccttggggcagcccatacaaggccatggggctgggcaagctgcacgcctgggtccggggtgggcacggtgcccgggcaacgagctgaaagctcatctgctctcaggggcccctccctggggacagcccctcctggctagtcacaccctgtaggctcctctatataacccaggggcacaggggctgccctcattctaccaccacctccacagcacagacagacactcaggagccagccagcgctagcgccaccatgatggccccaaagaagaagcggaaggtcggtatccacggagtcccagcagccgacaagaagtacagcatcggcctggacatcggcaccaactctgtgggctgggccgtgatcaccgacgagtacaaggtgcccagcaagaaattcaaggtgctgggcaacaccgaccggcacagcatcaagaagaacctgatcggagccctgctgttcgacagcggcgaaacagccgaggccacccggctgaagagaaccgccagaagaagatacaccagacggaagaaccggatctgctatctgcaagagatcttcagcaacgagatggccaaggtggacgacagcttcttccacagactggaagagtccttcctggtggaagaggataagaagcacgagcggcaccccatcttcggcaacatcgtggacgaggtggcctaccacgagaagtaccccaccatctaccacctgagaaagaaactggtggacagcaccgacaaggccgacctgcggctgatctatctggccctggcccacatgatcaagttccggggccacttcctgatcgagggcgacctgaaccccgacaacagcgacgtggacaagctgttcatccagctggtgcagacctacaaccagctgttcgaggaaaaccccatcaacgccagcggcgtggacgccaaggccatcctgtctgccagactgagcaagagcagacggctggaaaatctgatcgcccagctgcccggcgagaagaagaatggcctgttcggcaacctgattgccctgagcctgggcctgacccccaacttcaagagcaacttcgacctggccgaggatgccaaactgcagctgagcaaggacacctacgacgacgacctggacaacctgctggcccagatcggcgaccagtacgccgacctgtttctggccgccaagaacctgtccgacgccatcctgctgagcgacatcctgagagtgaacaccgagatcaccaaggcccccctgagcgcctctatgatcaagagatacgacgagcaccaccaggacctgaccctgctgaaagctctcgtgcggcagcagctgcctgagaagtacaaagagattttcttcgaccagagcaagaacggctacgccggctacattgacggcggagccagccaggaagagttctacaagttcatcaagcccatcctggaaaagatggacggcaccgaggaactgctcgtgaagctgaacagagaggacctgctgcggaagcagcggaccttcgacaacggcagcatcccccaccagatccacctgggagagctgcacgccattctgcggcggcaggaagatttttacccattcctgaaggacaaccgggaaaagatcgagaagatcctgaccttccgcatcccctactacgtgggccctctggccaggggaaacagcagattcgcctggatgaccagaaagagcgaggaaaccatcaccccctggaacttcgaggaagtggtggacaagggcgcttccgcccagagcttcatcgagcggatgaccaacttcgataagaacctgcccaacgagaaggtgctgcccaagcacagcctgctgtacgagtacttcaccgtgtataacgagctgaccaaagtgaaatacgtgaccgagggaatgagaaagcccgccttcctgagcggcgagcagaaaaaggccatcgtggacctgctgttcaagaccaaccggaaagtgaccgtgaagcagctgaaagaggactacttcaagaaaatcgagtgcttcgactccgtggaaatctccggcgtggaagatcggttcaacgcctccctgggcacataccacgatctgctgaaaattatcaaggacaaggacttcctggacaatgaggaaaacgaggacattctggaagatatcgtgctgaccctgacactgtttgaggacagagagatgatcgaggaacggctgaaaacctatgcccacctgttcgacgacaaagtgatgaagcagctgaagcggcggagatacaccggctggggcaggctgagccggaagctgatcaacggcatccgggacaagcagtccggcaagacaatcctggatttcctgaagtccgacggcttcgccaacagaaacttcatgcagctgatccacgacgacagcctgacctttaaagaggacatccagaaagcccaggtgtccggccagggcgatagcctgcacgagcacattgccaatctggccggcagccccgccattaagaagggcatcctgcagacagtgaaggtggtggacgagctcgtgaaagtgatgggccggcacaagcccgagaacatcgtgatcgaaatggccagagagaaccagaccacccagaagggacagaagaacagccgcgagagaatgaagcggatcgaagagggcatcaaagagctgggcagccagatcctgaaagaacaccccgtggaaaacacccagctgcagaacgagaagctgtacctgtactacctgcagaatgggcgggatatgtacgtggaccaggaactggacatcaaccggctgtccgactacgatgtggaccatatcgtgcctcagagctttctgaaggacgactccatcgacaacaaggtgctgaccagaagcgacaagaaccggggcaagagcgacaacgtgccctccgaagaggtcgtgaagaagatgaagaactactggcggcagctgctgaacgccaagctgattacccagagaaagttcgacaatctgaccaaggccgagagaggcggcctgagcgaactggataaggccggcttcatcaagagacagctggtggaaacccggcagatcacaaagcacgtggcacagatcctggactcccggatgaacactaagtacgacgagaatgacaagctgatccgggaagtgaaagtgatcaccctgaagtccaagctggtgtccgatttccggaaggatttccagttttacaaagtgcgcgagatcaacaactaccaccacgcccacgacgcctacctgaacgccgtcgtgggaaccgccctgatcaaaaagtaccctaagctggaaagcgagttcgtgtacggcgactacaaggtgtacgacgtgcggaagatgatcgccaagagcgagcaggaaatcggcaaggctaccgccaagtacttcttctacagcaacatcatgaactttttcaagaccgagattaccctggccaacggcgagatccggaagcggcctctgatcgagacaaacggcgaaaccggggagatcgtgtgggataagggccgggattttgccaccgtgcggaaagtgctgagcatgccccaagtgaatatcgtgaaaaagaccgaggtgcagacaggcggcttcagcaaagagtctatcctgcccaagaggaacagcgataagctgatcgccagaaagaaggactgggaccctaagaagtacggcggcttcgacagccccaccgtggcctattctgtgctggtggtggccaaagtggaaaagggcaagtccaagaaactgaagagtgtgaaagagctgctggggatcaccatcatggaaagaagcagcttcgagaagaatcccatcgactttctggaagccaagggctacaaagaagtgaaaaaggacctgatcatcaagctgcctaagtactccctgttcgagctggaaaacggccggaagagaatgctggcctctgccggcgaactgcagaagggaaacgaactggccctgccctccaaatatgtgaacttcctgtacctggccagccactatgagaagctgaagggctcccccgaggataatgagcagaaacagctgtttgtggaacagcacaagcactacctggacgagatcatcgagcagatcagcgagttctccaagagagtgatcctggccgacgctaatctggacaaagtgctgtccgcctacaacaagcaccgggataagcccatcagagagcaggccgagaatatcatccacctgtttaccctgaccaatctgggagcccctgccgccttcaagtactttgacaccaccatcgaccggaagaggtacaccagcaccaaagaggtgctggacgccaccctgatccaccagagcatcaccggcctgtacgagacacggatcgacctgtctcagctgggaggcgacaagcgtcctgctgctactaagaaagctggtcaagctaagaaaaagaaatgaatcgattagcaataaaggatcgtttattttcattggaagcgtgtgttggttttttgatcaggcgcgggtaccaggtcgcggccgctctagagcatggctacgtagataagtagcatggcgggttaatcattaactacaaggaacccctagtgatggagttggccactccctctctgcgcgctcgctcgctcactgaggccgggcgaccaaaggtcgcccgacgcccgggctttgcccgggcggcctcagtgagcgagcgagcgcgcagagagggacatgcaagctgtagccaaccactagaactatagctagagtcctgggcgaacaaacgatgctcgccttccagaaaaccgaggatgcgaaccacttcatccggggtcagcaccaccggcaagcgccgcgacggccgaggtcttccgatctcctgaagccagggcagatccgtgcacagcaccttgccgtagaagaacagcaaggccgccaatgcctgacgatgcgtggagaccgaaaccttgcgctcgttcgccagccaggacagaaatgcctcgacttcgctgctgcccaaggttgccgggtgacgcacaccgtggaaacggatgaaggcacgaacccagttgacataagcctgttcggttcgtaaactgtaatgcaagtagcgtatgcgctcacgcaactggtccagaaccttgaccgaacgcagcggtggtaacggcgcagtggcggttttcatggcttgttatgactgtttttttgtacagtctatgcctcgggcatccaagcagcaagcgcgttacgccgtgggtcgatgtttgatgttatggagcagcaacgatgttacgcagcagcaacgatgttacgcagcagggcagtcgccctaaaacaaagttaggtggctcaagtatgggcatcattcgcacatgtaggctcggccctgaccaagtcaaatccatgcgggctgctcttgatcttttcggtcgtgagttcggagacgtagccacctactcccaacatcagccggactccgattacctcgggaacttgctccgtagtaagacattcatcgcgcttgctgccttcgaccaagaagcggttgttggcgctctcgcggcttacgttctgcccaagtttgagcagccgcgtagtgagatctatatctatgatctcgcagtctccggcgagcaccggaggcagggcattgccaccgcgctcatcaatctcctcaagcatgaggccaacgcgcttggtgcttatgtgatctacgtgcaagcagattacggtgacgatcccgcagtggctctctatacaaagttgggcatacgggaagaagtgatgcactttgatatcgacccaagtaccgccacctaacaattcgttcaagccgagatcggcttcccggccgcggagttgttcggtaaattgtcacaacgccgcgaatatagtctttaccatgcccttggccacgcccctctttaatacgacgggcaatttgcacttcagaaaatgaagagtttgctttagccataacaaaagtccagtatgctttttcacagcataactggactgatttcagtttacaactattctgtctagtttaagactttattgtcatagtttagatctattttgttcagtttaagactttattgtccgcccacacccgcttacgc

SEQ ID NO: 903 - DNA, 60 bp, Artificial Sequence
  source: /note="Description of Artificial Sequence: Synthetic oligonucleotide"
tagcaataaaggatcgtttattttcattggaagcgtgtgttggttttttgatcaggcgcg

SEQ ID NO: 904 - DNA, 3 bp, Artificial Sequence
  source: /note="Description of Artificial Sequence: Synthetic oligonucleotide"
tag

SEQ ID NO: 905 - DNA, 3 bp, Artificial Sequence
  source: /note="Description of Artificial Sequence: Synthetic oligonucleotide"
taa

SEQ ID NO: 906 - DNA, 3 bp, Artificial Sequence
  source: /note="Description of Artificial Sequence: Synthetic oligonucleotide"
tga

SEQ ID NO: 907 - DNA, 166 bp, Artificial Sequence
  source: /note="Description of Artificial Sequence: Synthetic polynucleotide"
tgtgggcggacaaaatagttgggaactgggaggggtggaaatggagtttttaaggattatttagggaagagtgacaaaatagatgggaactgggtgtagcgtcgtaagctaatacgaaaattaaaaatgacaaaatagtttggaactagatttcacttatctggtt

SEQ ID NO: 908 - DNA, 225 bp, Artificial Sequence
  source: /note="Description of Artificial Sequence: Synthetic polynucleotide"
gaatatagtctttaccatgcccttggccacgcccctctttaatacgacgggcaatttgcacttcagaaaatgaagagtttgctttagccataacaaaagtccagtatgctttttcacagcataactggactgatttcagtttacaactattctgtctagtttaagactttattgtcatagtttagatctattttgttcagtttaagactttattgtccgcccaca

SEQ ID NO: 909 - DNA, 1155 bp, Artificial Sequence
  source: /note="Description of Artificial Sequence: Synthetic polynucleotide"
catgcaagctgtagccaaccactagaactatagctagagtcctgggcgaacaaacgatgctcgccttccagaaaaccgaggatgcgaaccacttcatccggggtcagcaccaccggcaagcgccgcgacggccgaggtcttccgatctcctgaagccagggcagatccgtgcacagcaccttgccgtagaagaacagcaaggccgccaatgcctgacgatgcgtggagaccgaaaccttgcgctcgttcgccagccaggacagaaatgcctcgacttcgctgctgcccaaggttgccgggtgacgcacaccgtggaaacggatgaaggcacgaacccagttgacataagcctgttcggttcgtaaactgtaatgcaagtagcgtatgcgctcacgcaactggtccagaaccttgaccgaacgcagcggtggtaacggcgcagtggcggttttcatggcttgttatgactgtttttttgtacagtctatgcctcgggcatccaagcagcaagcgcgttacgccgtgggtcgatgtttgatgttatggagcagcaacgatgttacgcagcagcaacgatgttacgcagcagggcagtcgccctaaaacaaagttaggtggctcaagtatgggcatcattcgcacatgtaggctcggccctgaccaagtcaaatccatgcgggctgctcttgatcttttcggtcgtgagttcggagacgtagccacctactcccaacatcagccggactccgattacctcgggaacttgctccgtagtaagacattcatcgcgcttgctgccttcgaccaagaagcggttgttggcgctctcgcggcttacgttctgcccaagtttgagcagccgcgtagtgagatctatatctatgatctcgcagtctccggcgagcaccggaggcagggcattgccaccgcgctcatcaatctcctcaagcatgaggccaacgcgcttggtgcttatgtgatctacgtgcaagcagattacggtgacgatcccgcagtggctctctatacaaagttgggcatacgggaagaagtgatgcactttgatatcgacccaagtaccgccacctaacaattcgttcaagccgagatcggcttcccggccgcggagttgttcggtaaattgtcacaacgccg

SEQ ID NO: 910 - DNA, 2861 bp, Artificial Sequence
  source: /note="Description of Artificial Sequence: Synthetic polynucleotide"
ccactccctctatgcgcgctcgctcactcactcggccctggagaccaaaggtctccagactgccggcctctggccggcagggccgagtgagtgagcgagcgcgcatagagggagtgggtacctccatcatctaggtttgccagatctgatatcggcgcgcccctgggcgcgcccgagtccaacacccgtgggaatcccatgggcaccatggcccctcgctccaaaaatgctttcgcgtcgcgcagacactgctcggtagtttcggggatcagcgtttgagtaagagcccgcgtctgaaccctccgcgccgccccggccccagtggaaagacgcgcaggcaaaacgcaccacgtgacggagcgtgaccgcgcgccgagcgcgcgccaaggtcgggcaggaagagggcctatttcccatgattccttcatatttgcatatacgatacaaggctgttagagagataattagaattaatttgactgtaaacacaaagatattagtacaaaatacgtgacgtagaaagtaataatttcttgggtagtttgcagttttaaaattatgttttaaaatggactatcatatgcttaccgtaacttgaaagtatttcgatttcttggctttatatatcttgtggaaaggacgaaacaccgcactagagtaacagtctgacgtttaagagctatgctggaaacagcatagcaagtttaaataaggctagtccgttatcaacttgaaaaagtggcaccgagtcggtgctttttttgcggccgcgctcggcgcgcccatatttgcatgtcgctatgtgttctgggaaatcaccataaacgtgaaatgtctttggatttgggaatcttataagttctgtatgagaccacggtacaccgcactagagtaacagtctgacgtttaagagctatgctggaaacagcatagcaagtttaaataaggctagtccgttatcaacttgaaaaagtggcaccgagtcggtgctttttttgcggccgctgacggcgcgccctgcagtatttagcatgccccacccatctgcaaggcattctggatagtgtcaaaacagccggaaatcaagtccgtttatctcaaactttagcattttgggaataaatgatatttgctatgctggttaaattagattttagttaaatttcctgctgaagctctagtacgataagtaacttgacctaagtgtaaagttgagatttccttcaggtttatatagcttgtgcgccgcctgggtacaccgcactagagtaacagtctgacgtttaagagctatgctggaaacagcatagcaagtttaaataaggctagtccgttatcaacttgaaaaagtggcaccgagtcggtgctttttttgcggccgcgcttgcggccgcctcgagtgatcaaaaaaaccaacacacgcttccaatgaaaataaacgatcctttattgctagcctttacttgtacagctcgtccatgccgagagtgatcccggcggcggtcacgaactccagcaggaccatgtgatcgcgcttctcgttggggtctttgctcagggcggactgggtgctcaggtagtggttgtcgggcagcaacacggggccgtcgccgatgggggtgttctgctggtagtggtcggcgagctgcacgctgccgtcctcgatgttgtggcggatcttgaagttcaccttgatgccgttcttctgcttgtcggccatgatatagacgttgtggctgttgtagttgtactccagcttgtgccccaggatgttgccgtcctccttgaagtcgatgcccttcagctcgatgcggttcaccagggtgtcgccctcgaacttcacctcggcgcgggtcttgtagttgccgtcgtccttgaagaagatggtgcgctcctggacgtagccttcgggcatggcggacttgaagaagtcgtgctgcttcatgtggtcggggtagcggctgaagcactgcacgccgtaggtcagggtggtcacgagggtgggccagggcacgggcagcttgccggtggtgcagatgaacttcagggtcagcttgccgtaggtggcatcgccctcgccctcgccggacacgctgaacttgtggccgtttacgtcgccgtccagctcgaccaggatgggcaccaccccggtgaacagctcctcgcccttgctcaccatggtggcgaccggtggatcccgggcccgcggggtggctttaccaacagtacccggaatgccaagcttacttagatcgcagtctcgacgctggctggctcctgagtgtctgtctgtgctgtggaggtggtggtagaatgagggcagcccctgtgcccctgggttatatagaggagcctacagggtgtgactagccaggaggggctgtccccagggaggggcccctgagagcagatgagctttcagctcgttgcccgggcaccgtgcccaccccggacccaggcgtgcagcttgcccagccccatggccttgtatgggctgccccaagggctgacttgctcactggttcctaaactaagtgctgagtctagctggcgggggacagctggcccttcgccgggaacatggcatgcagggttatttttagaggcagcaggtgttgggggggggggggcagccacatgtctgggttaattataaccaggcatctcgggtgtccccaggccttgcctccttacatgggcacgtcgacgatatcagatctaggaacccctagtgatggagttggccactccctctctgcgcgctcgctcgctcactgaggccgcccgggcaaagcccgggcgtcgggcgacctttggtcgcccggcctcagtgagcgagcgagcgcgcagagagggagtgg

SEQ ID NO: 911 - DNA, 2861 bp, Artificial Sequence
  source: /note="Description of Artificial Sequence: Synthetic polynucleotide"
cctgcaggcagctgcgcgctcgctcgctcactgaggccgcccgggcaaagcccgggcgtcgggcgacctttggtcgcccggcctcagtgagcgagcgagcgcgcagagagggagtggccaactccatcactaggggttcctagatctgatatcggcgcgcccctgggcgcgcccgagtccaacacccgtgggaatcccatgggcaccatggcccctcgctccaaaaatgctttcgcgtcgcgcagacactgctcggtagtttcggggatcagcgtttgagtaagagcccgcgtctgaaccctccgcgccgccccggccccagtggaaagacgcgcaggcaaaacgcaccacgtgacggagcgtgaccgcgcgccgagcgcgcgccaaggtcgggcaggaagagggcctatttcccatgattccttcatatttgcatatacgatacaaggctgttagagagataattagaattaatttgactgtaaacacaaagatattagtacaaaatacgtgacgtagaaagtaataatttcttgggtagtttgcagttttaaaattatgttttaaaatggactatcatatgcttaccgtaacttgaaagtatttcgatttcttggctttatatatcttgtggaaaggacgaaacaccgcactagagtaacagtctgacgtttaagagctatgctggaaacagcatagcaagtttaaataaggctagtccgttatcaacttgaaaaagtggcaccgagtcggtgctttttttgcggccgcgctcggcgcgcccatatttgcatgtcgctatgtgttctgggaaatcaccataaacgtgaaatgtctttggatttgggaatcttataagttctgtatgagaccacggtacaccgcactagagtaacagtctgacgtttaagagctatgctggaaacagcatagcaagtttaaataaggctagtccgttatcaacttgaaaaagtggcaccgagtcggtgctttttttgcggccgctgacggcgcgccctgcagtatttagcatgccccacccatctgcaaggcattctggatagtgtcaaaacagccggaaatcaagtccgtttatctcaaactttagcattttgggaataaatgatatttgctatgctggttaaattagattttagttaaatttcctgctgaagctctagtacgataagtaacttgacctaagtgtaaagttgagatttccttcaggtttatatagcttgtgcgccgcctgggtacaccgcactagagtaacagtctgacgtttaagagctatgctggaaacagcatagcaagtttaaataaggctagtccgttatcaacttgaaaaagtggcaccgagtcggtgctttttttgcggccgcgcttgcggccgcctcgagtgatcaaaaaaaccaacacacgcttccaatgaaaataaacgatcctttattgctagcctttacttgtacagctcgtccatgccgagagtgatcccggcggcggtcacgaactccagcaggaccatgtgatcgcgcttctcgttggggtctttgctcagggcggactgggtgctcaggtagtggttgtcgggcagcaacacggggccgtcgccgatgggggtgttctgctggtagtggtcggcgagctgcacgctgccgtcctcgatgttgtggcggatcttgaagttcaccttgatgccgttcttctgcttgtcggccatgatatagacgttgtggctgttgtagttgtactccagcttgtgccccaggatgttgccgtcctccttgaagtcgatgcccttcagctcgatgcggttcaccagggtgtcgccctcgaacttcacctcggcgcgggtcttgtagttgccgtcgtccttgaagaagatggtgcgctcctggacgtagccttcgggcatggcggacttgaagaagtcgtgctgcttcatgtggtcggggtagcggctgaagcactgcacgccgtaggtcagggtggtcacgagggtgggccagggcacgggcagcttgccggtggtgcagatgaacttcagggtcagcttgccgtaggtggcatcgccctcgccctcgccggacacgctgaacttgtggccgtttacgtcgccgtccagctcgaccaggatgggcaccaccccggtgaacagctcctcgcccttgctcaccatggtggcgaccggtggatcccgggcccgcggggtggctttaccaacagtacccggaatgccaagcttacttagatcgcagtctcgacgctggctggctcctgagtgtctgtctgtgctgtggaggtggtggtagaatgagggcagcccctgtgcccctgggttatatagaggagcctacagggtgtgactagccaggaggggctgtccccagggaggggcccctgagagcagatgagctttcagctcgttgcccgggcaccgtgcccaccccggacccaggcgtgcagcttgcccagccccatggccttgtatgggctgccccaagggctgacttgctcactggttcctaaactaagtgctgagtctagctggcgggggacagctggcccttcgccgggaacatggcatgcagggttatttttagaggcagcaggtgttgggggggggggggcagccacatgtctgggttaattataaccaggcatctcgggtgtccccaggccttgcctccttacatgggcacgtcgacgatatcagatctaggaacccctagtgatggagttggccactccctctctgcgcgctcgctcgctcactgaggccgggcgaccaaaggtcgcccgacgcccgggctttgcccgggcggcctcagtgagcgagcgagcgcgcagctgcctgcagg

SEQ ID NO: 912 - DNA, 4585 bp, Artificial Sequence
  source: /note="Description of Artificial Sequence: Synthetic polynucleotide"
aagatgacggtttgtcacatggagttggcaggatgtttgattaaaaacataacaggaagaaaaatgccccgctgtgggcggacaaaatagttgggaactgggaggggtggaaatggagtttttaaggattatttagggaagagtgacaaaatagatgggaactgggtgtagcgtcgtaagctaatacgaaaattaaaaatgacaaaatagtttggaactagatttcacttatctggttcggatctcctaggcgatatcagtgatcacggatctcgaccaattgacattattgaagcaactagtatcgattttatcagggttattgtctcagacctgcaggcagctgcgcgctcgctcgctcactgaggccgcccgggcaaagcccgggcgtcgggcgacctttggtcgcccggcctcagtgagcgagcgagcgcgcagagagggagtggccaactccatcactaggggttcctagatctgatatcggcgcgcccctgggcgcgcccgagtccaacacccgtgggaatcccatgggcaccatggcccctcgctccaaaaatgctttcgcgtcgcgcagacactgctcggtagtttcggggatcagcgtttgagtaagagcccgcgtctgaaccctccgcgccgccccggccccagtggaaagacgcgcaggcaaaacgcaccacgtgacggagcgtgaccgcgcgccgagcgcgcgccaaggtcgggcaggaagagggcctatttcccatgattccttcatatttgcatatacgatacaaggctgttagagagataattagaattaatttgactgtaaacacaaagatattagtacaaaatacgtgacgtagaaagtaataatttcttgggtagtttgcagttttaaaattatgttttaaaatggactatcatatgcttaccgtaacttgaaagtatttcgatttcttggctttatatatcttgtggaaaggacgaaacaccgcactagagtaacagtctgacgtttaagagctatgctggaaacagcatagcaagtttaaataaggctagtccgttatcaacttgaaaaagtggcaccgagtcggtgctttttttgcggccgcgcttcggcgcgcccatatttgcatgtcgctatgtgttctgggaaatcaccataaacgtgaaatgtctttggatttgggaatcttataagttctgtatgagaccacggtacaccgcactagagtaacagtctgacgtttaagagctatgctggaaacagcatagcaagtttaaataaggctagtccgttatcaacttgaaaaagtggcaccgagtcggtgctttttttgcggccgctgacggcgcgccctgcagtatttagcatgccccacccatctgcaaggcattctggatagtgtcaaaacagccggaaatcaagtccgtttatctcaaactttagcattttgggaataaatgatatttgctatgctggttaaattagattttagttaaatttcctgctgaagctctagtacgataagtaacttgacctaagtgtaaagttgagatttccttcaggtttatatagcttgtgcgccgcctgggtacaccgcactagagtaacagtctgacgtttaagagctatgctggaaacagcatagcaagtttaaataaggctagtccgttatcaacttgaaaaagtggcaccgagtcggtgctttttttgcggccgcgctgcggccgcctcgagtgatcaaaaaaaccaacacacgcttccaatgaaaataaacgatcctttattgctagcctttacttgtacagctcgtccatgccgagagtgatcccggcggcggtcacgaactccagcaggaccatgtgatcgcgcttctcgttggggtctttgctcagggcggactgggtgctcaggtagtggttgtcgggcagcaacacggggccgtcgccgatgggggtgttctgctggtagtggtcggcgagctgcacgctgccgtcctcgatgttgtggcggatcttgaagttcaccttgatgccgttcttctgcttgtcggccatgatatagacgttgtggctgttgtagttgtactccagcttgtgccccaggatgttgccgtcctccttgaagtcgatgcccttcagctcgatgcggttcaccagggtgtcgccctcgaacttcacctcggcgcgggtcttgtagttgccgtcgtccttgaagaagatggtgcgctcctggacgtagccttcgggcatggcggacttgaagaagtcgtgctgcttcatgtggtcggggtagcggctgaagcactgcacgccgtaggtcagggtggtcacgagggtgggccagggcacgggcagcttgccggtggtgcagatgaacttcagggtcagcttgccgtaggtggcatcgccctcgccctcgccggacacgctgaacttgtggccgtttacgtcgccgtccagctcgaccaggatgggcaccaccccggtgaacagctcctcgcccttgctcaccatggtggcgaccggtggatcccgggcccgcggggtggctttaccaacagtacccggaatgccaagcttacttagatcgcagtctcgacgctggctggctcctgagtgtctgtctgtgctgtggaggtggtggtagaatgagggcagcccctgtgcccctgggttatatagaggagcctacagggtgtgactagccaggaggggctgtccccagggaggggcccctgagagcagatgagctttcagctcgttgcccgggcaccgtgcccaccccggacccaggcgtgcagcttgcccagccccatggccttgtatgggctgccccaagggctgacttgctcactggttcctaaactaagtgctgagtctagctggcgggggacagctggcccttcgccgggaacatggcatgcagggttatttttagaggcagcaggtgttgggggggggggggcagccacatgtctgggttaattataaccaggcatctcgggtgtccccaggccttgcctccttacatgggcacgtcgacgatatcagatctaggaacccctagtgatggagttggccactccctctctgcgcgctcgctcgctcactgaggccgggcgaccaaaggtcgcccgacgcccgggctttgcccgggcggcctcagtgagcgagcgagcgcgcagctgcctgcaggcatgcaagctgtagccaaccactagaactatagctagagtcctgggcgaacaaacgatgctcgccttccagaaaaccgaggatgcgaaccacttcatccggggtcagcaccaccggcaagcgccgcgacggccgaggtcttccgatctcctgaagccagggcagatccgtgcacagcaccttgccgtagaagaacagcaaggccgccaatgcctgacgatgcgtggagaccgaaaccttgcgctcgttcgccagccaggacagaaatgcctcgacttcgctgctgcccaaggttgccgggtgacgcacaccgtggaaacggatgaaggcacgaacccagttgacataagcctgttcggttcgtaaactgtaatgcaagtagcgtatgcgctcacgcaactggtccagaaccttgaccgaacgcagcggtggtaacggcgcagtggcggttttcatggcttgttatgactgtttttttgtacagtctatgcctcgggcatccaagcagcaagcgcgttacgccgtgggtcgatgtttgatgttatggagcagcaacgatgttacgcagcagcaacgatgttacgcagcagggcagtcgccctaaaacaaagttaggtggctcaagtatgggcatcattcgcacatgtaggctcggccctgaccaagtcaaatccatgcgggctgctcttgatcttttcggtcgtgagttcggagacgtagccacctactcccaacatcagccggactccgattacctcgggaacttgctccgtagtaagacattcatcgcgcttgctgccttcgaccaagaagcggttgttggcgctctcgcggcttacgttctgcccaagtttgagcagccgcgtagtgagatctatatctatgatctcgcagtctccggcgagcaccggaggcagggcattgccaccgcgctcatcaatctcctcaagcatgaggccaacgcgcttggtgcttatgtgatctacgtgcaagcagattacggtgacgatcccgcagtggctctctatacaaagttgggcatacgggaagaagtgatgcactttgatatcgacccaagtaccgccacctaacaattcgttcaagccgagatcggcttcccggccgcggagttgttcggtaaattgtcacaacgccgcgaatatagtctttaccatgcccttggccacgcccctctttaatacgacgggcaatttgcacttcagaaaatgaagagtttgctttagccataacaaaagtccagtatgctttttcacagcataactggactgatttcagtttacaactattctgtctagtttaagactttattgtcatagtttagatctattttgttcagtttaagactttattgtccgcccacacccgcttacgc

SEQ ID NO: 913 - DNA, 4585 bp, Artificial Sequence
  source: /note="Description of Artificial Sequence: Synthetic polynucleotide"
aagatgacggtttgtcacatggagttggcaggatgtttgattaaaaacataacaggaagaaaaatgccccgctgtgggcggacaaaatagttgggaactgggaggggtggaaatggagtttttaaggattatttagggaagagtgacaaaatagatgggaactgggtgtagcgtcgtaagctaatacgaaaattaaaaatgacaaaatagtttggaactagatttcacttatctggttcggatctcctaggcgatatcagtgatcacggatctcgaccaattgacattattgaagcaactagtatcgattttatcagggttattgtctcagaccactccctctatgcgcgctcgctcactcactcggccctggagaccaaaggtctccagactgccggcctctggccggcagggccgagtgagtgagcgagcgcgcatagagggagtgggtacctccatcatctaggtttgccagatctgatatcggcgcgcccctgggcgcgcccgagtccaacacccgtgggaatcccatgggcaccatggcccctcgctccaaaaatgctttcgcgtcgcgcagacactgctcggtagtttcggggatcagcgtttgagtaagagcccgcgtctgaaccctccgcgccgccccggccccagtggaaagacgcgcaggcaaaacgcaccacgtgacggagcgtgaccgcgcgccgagcgcgcgccaaggtcgggcaggaagagggcctatttcccatgattccttcatatttgcatatacgatacaaggctgttagagagataattagaattaatttgactgtaaacacaaagatattagtacaaaatacgtgacgtagaaagtaataatttcttgggtagtttgcagttttaaaattatgttttaaaatggactatcatatgcttaccgtaacttgaaagtatttcgatttcttggctttatatatcttgtggaaaggacgaaacaccgcactagagtaacagtctgacgtttaagagctatgctggaaacagcatagcaagtttaaataaggctagtccgttatcaacttgaaaaagtggcaccgagtcggtgctttttttgcggccgcgcttcggcgcgcccatatttgcatgtcgctatgtgttctgggaaatcaccataaacgtgaaatgtctttggatttgggaatcttataagttctgtatgagaccacggtacaccgcactagagtaacagtctgacgtttaagagctatgctggaaacagcatagcaagtttaaataaggctagtccgttatcaacttgaaaaagtggcaccgagtcggtgctttttttgcggccgctgacggcgcgccctgcagtatttagcatgccccacccatctgcaaggcattctggatagtgtcaaaacagccggaaatcaagtccgtttatctcaaactttagcattttgggaataaatgatatttgctatgctggttaaattagattttagttaaatttcctgctgaagctctagtacgataagtaacttgacctaagtgtaaagttgagatttccttcaggtttatatagcttgtgcgccgcctgggtacaccgcactagagtaacagtctgacgtttaagagctatgctggaaacagcatagcaagtttaaataaggctagtccgttatcaacttgaaaaagtggcaccgagtcggtgctttttttgcggccgcgctgcggccgcctcgagtgatcaaaaaaaccaacacacgcttccaatgaaaataaacgatcctttattgctagcctttacttgtacagctcgtccatgccgagagtgatcccggcggcggtcacgaactccagcaggaccatgtgatcgcgcttctcgttggggtctttgctcagggcggactgggtgctcaggtagtggttgtcgggcagcaacacggggccgtcgccgatgggggtgttctgctggtagtggtcggcgagctgcacgctgccgtcctcgatgttgtggcggatcttgaagttcaccttgatgccgttcttctgcttgtcggccatgatatagacgttgtggctgttgtagttgtactccagcttgtgccccaggatgttgccgtcctccttgaagtcgatgcccttcagctcgatgcggttcaccagggtgtcgccctcgaacttcacctcggcgcgggtcttgtagttgccgtcgtccttgaagaagatggtgcgctcctggacgtagccttcgggcatggcggacttgaagaagtcgtgctgcttcatgtggtcggggtagcggctgaagcactgcacgccgtaggtcagggtggtcacgagggtgggccagggcacgggcagcttgccggtggtgcagatgaacttcagggtcagcttgccgtaggtggcatcgccctcgccctcgccggacacgctgaacttgtggccgtttacgtcgccgtccagctcgaccaggatgggcaccaccccggtgaacagctcctcgcccttgctcaccatggtggcgaccggtggatcccgggcccgcggggtggctttaccaacagtacccggaatgccaagcttacttagatcgcagtctcgacgctggctggctcctgagtgtctgtctgtgctgtggaggtggtggtagaatgagggcagcccctgtgcccctgggttatatagaggagcctacagggtgtgactagccaggaggggctgtccccagggaggggcccctgagagcagatgagctttcagctcgttgcccgggcaccgtgcccaccccggacccaggcgtgcagcttgcccagccccatggccttgtatgggctgccccaagggctgacttgctcactggttcctaaactaagtgctgagtctagctggcgggggacagctggcccttcgccgggaacatggcatgcagggttatttttagaggcagcaggtgttgggggggggggggcagccacatgtctgggttaattataaccaggcatctcgggtgtccccaggccttgcctccttacatgggcacgtcgacgatatcagatctaggaacccctagtgatggagttggccactccctctctgcgcgctcgctcgctcactgaggccgcccgggcaaagcccgggcgtcgggcgacctttggtcgcccggcctcagtgagcgagcgagcgcgcagagagggagtggcatgcaagctgtagccaaccactagaactatagctagagtcctgggcgaacaaacgatgctcgccttccagaaaaccgaggatgcgaaccacttcatccggggtcagcaccaccggcaagcgccgcgacggccgaggtcttccgatctcctgaagccagggcagatccgtgcacagcaccttgccgtagaagaacagcaaggccgccaatgcctgacgatgcgtggagaccgaaaccttgcgctcgttcgccagccaggacagaaatgcctcgacttcgctgctgcccaaggttgccgggtgacgcacaccgtggaaacggatgaaggcacgaacccagttgacataagcctgttcggttcgtaaactgtaatgcaagtagcgtatgcgctcacgcaactggtccagaaccttgaccgaacgcagcggtggtaacggcgcagtggcggttttcatggcttgttatgactgtttttttgtacagtctatgcctcgggcatccaagcagcaagcgcgttacgccgtgggtcgatgtttgatgttatggagcagcaacgatgttacgcagcagcaacgatgttacgcagcagggcagtcgccctaaaacaaagttaggtggctcaagtatgggcatcattcgcacatgtaggctcggccctgaccaagtcaaatccatgcgggctgctcttgatcttttcggtcgtgagttcggagacgtagccacctactcccaacatcagccggactccgattacctcgggaacttgctccgtagtaagacattcatcgcgcttgctgccttcgaccaagaagcggttgttggcgctctcgcggcttacgttctgcccaagtttgagcagccgcgtagtgagatctatatctatgatctcgcagtctccggcgagcaccggaggcagggcattgccaccgcgctcatcaatctcctcaagcatgaggccaacgcgcttggtgcttatgtgatctacgtgcaagcagattacggtgacgatcccgcagtggctctctatacaaagttgggcatacgggaagaagtgatgcactttgatatcgacccaagtaccgccacctaacaattcgttcaagccgagatcggcttcccggccgcggagttgttcggtaaattgtcacaacgccgcgaatatagtctttaccatgcccttggccacgcccctctttaatacgacgggcaatttgcacttcagaaaatgaagagtttgctttagccataacaaaagtccagtatgctttttcacagcataactggactgatttcagtttacaactattctgtctagtttaagactttattgtcatagtttagatctattttgttcagtttaagactttattgtccgcccacacccgcttacgc

SEQ ID NO: 914 - DNA, 2285 bp, Artificial Sequence
  source: /note="Description of Artificial Sequence: Synthetic polynucleotide"
ccactccctctatgcgcgctcgctcactcactcggccctggagaccaaaggtctccagactgccggcctctggccggcagggccgagtgagtgagcgagcgcgcatagagggagtgggtacctccatcatctaggtttgccagatctgatatcggcgcgcccctgggcgcgcccgagtccaacacccgtgggaatcccatgggcaccatggcccctcgctccaaaaatgctttcgcgtcgcgcagacactgctcggtagtttcggggatcagcgtttgagtaagagcccgcgtctgaaccctccgcgccgccccggccccagtggaaagacgcgcaggcaaaacgcaccacgtgacggagcgtgaccgcgcgccgagcgcgcgccaaggtcgggcaggaagagggcctatttcccatgattccttcatatttgcatatacgatacaaggctgttagagagataattagaattaatttgactgtaaacacaaagatattagtacaaaatacgtgacgtagaaagtaataatttcttgggtagtttgcagttttaaaattatgttttaaaatggactatcatatgcttaccgtaacttgaaagtatttcgatttcttggctttatatatcttgtggaaaggacgaaacaccgcaccagagtaacagtctgaggtttaagagctatgctggaaacagcatagcaagtttaaataaggctagtccgttatcaacttgaaaaagtggcaccgagtcggtgctttttttgcggccgcgctcggcgcgcccatatttgcatgtcgctatgtgttctgggaaatcaccataaacgtgaaatgtctttggatttgggaatcttataagttctgtatgagaccacggtacaccgcaccagagtaacagtctgaggtttaagagctatgctggaaacagcatagcaagtttaaataaggctagtccgttatcaacttgaaaaagtggcaccgagtcggtgctttttttgcggccgctgacggcgcgccctgcagtatttagcatgccccacccatctgcaaggcattctggatagtgtcaaaacagccggaaatcaagtccgtttatctcaaactttagcattttgggaataaatgatatttgctatgctggttaaattagattttagttaaatttcctgctgaagctctagtacgataagtaacttgacctaagtgtaaagttgagatttccttcaggtttatatagcttgtgcgccgcctgggtacaccgcaccagagtaacagtctgaggtttaagagctatgctggaaacagcatagcaagtttaaataaggctagtccgttatcaacttgaaaaagtggcaccgagtcggtgctttttttgcggccgcgctgtttaaaccaacaaaatcagcagctaatgaaggcaagtcagcaggtcactcatcattttccacttcggcaatgcagtgggattattccaacagaggtttttcacagcattccttcagttaactggagatcgaatcttgattttcacagatatacttggcaaggtccgccctgtcatcagcacattcaagcagatctccatggcagcattccgtgtggacttaggtaagatctgtcactaacttggaaacttctgcaaactcagcttagggaaatctctggctcaggcgagctactgcctcagcttagaaagctctttctccaaattattggagactggcacacttaagtccctgttaggcagacgaagccttcccttcatcccgaagttcatcgagctttggcaacaggcaggcagctttatcagcagcttggcaacattctgtaaaagcagctttatacctttaagcaaagaaaaggagttccggggcataaaagtaaggatgtcttctggcaatttataataagtattttttcaaaaatgtctcttcattgtcatgaaaagcagtgcatcacacatcaacctctggtctcaccaatcgggggaggtttgggttgtttacttagtgttgcaagaattattttattctctcaggttcttgttttgcacagcagtcagctcattcaccataggtttcacgaagagttgctgcggccgcctcgataatacgactcactatagggtcgacgatatcagatctaggaacccctagtgatggagttggccactccctctctgcgcgctcgctcgctcactgaggccgcccgggcaaagcccgggcgtcgggcgacctttggtcgcccggcctcagtgagcgagcgagcgcgcagagagggagtgg

SEQ ID NO: 915 - DNA, 2285 bp, Artificial Sequence
  source: /note="Description of Artificial Sequence: Synthetic polynucleotide"
cctgcaggcagctgcgcgctcgctcgctcactgaggccgcccgggcaaagcccgggcgtcgggcgacctttggtcgcccggcctcagtgagcgagcgagcgcgcagagagggagtggccaactccatcactaggggttcctagatctgatatcggcgcgcccctgggcgcgcccgagtccaacacccgtgggaatcccatgggcaccatggcccctcgctccaaaaatgctttcgcgtcgcgcagacactgctcggtagtttcggggatcagcgtttgagtaagagcccgcgtctgaaccctccgcgccgccccggccccagtggaaagacgcgcaggcaaaacgcaccacgtgacggagcgtgaccgcgcgccgagcgcgcgccaaggtcgggcaggaagagggcctatttcccatgattccttcatatttgcatatacgatacaaggctgttagagagataattagaattaatttgactgtaaacacaaagatattagtacaaaatacgtgacgtagaaagtaataatttcttgggtagtttgcagttttaaaattatgttttaaaatggactatcatatgcttaccgtaacttgaaagtatttcgatttcttggctttatatatcttgtggaaaggacgaaacaccgcaccagagtaacagtctgaggtttaagagctatgctggaaacagcatagcaagtttaaataaggctagtccgttatcaacttgaaaaagtggcaccgagtcggtgctttttttgcggccgcgctcggcgcgcccatatttgcatgtcgctatgtgttctgggaaatcaccataaacgtgaaatgtctttggatttgggaatcttataagttctgtatgagaccacggtacaccgcaccagagtaacagtctgaggtttaagagctatgctggaaacagcatagcaagtttaaataaggctagtccgttatcaacttgaaaaagtggcaccgagtcggtgctttttttgcggccgctgacggcgcgccctgcagtatttagcatgccccacccatctgcaaggcattctggatagtgtcaaaacagccggaaatcaagtccgtttatctcaaactttagcattttgggaataaatgatatttgctatgctggttaaattagattttagttaaatttcctgctgaagctctagtacgataagtaacttgacctaagtgtaaagttgagatttccttcaggtttatatagcttgtgcgccgcctgggtacaccgcaccagagtaacagtctgaggtttaagagctatgctggaaacagcatagcaagtttaaataaggctagtccgttatcaacttgaaaaagtggcaccgagtcggtgctttttttgcggccgcgctgtttaaaccaacaaaatcagcagctaatgaaggcaagtcagcaggtcactcatcattttccacttcggcaatgcagtgggattattccaacagaggtttttcacagcattccttcagttaactggagatcgaatcttgattttcacagatatacttggcaaggtccgccctgtcatcagcacattcaagcagatctccatggcagcattccgtgtggacttaggtaagatctgtcactaacttggaaacttctgcaaactcagcttagggaaatctctggctcaggcgagctactgcctcagcttagaaagctctttctccaaattattggagactggcacacttaagtccctgttaggcagacgaagccttcccttcatcccgaagttcatcgagctttggcaacaggcaggcagctttatcagcagcttggcaacattctgtaaaagcagctttatacctttaagcaaagaaaaggagttccggggcataaaagtaaggatgtcttctggcaatttataataagtattttttcaaaaatgtctcttcattgtcatgaaaagcagtgcatcacacatcaacctctggtctcaccaatcgggggaggtttgggttgtttacttagtgttgcaagaattattttattctctcaggttcttgttttgcacagcagtcagctcattcaccataggtttcacgaagagttgctgcggccgcctcgataatacgactcactatagggtcgacgatatcagatctaggaacccctagtgatggagttggccactccctctctgcgcgctcgctcgctcactgaggccgggcgaccaaaggtcgcccgacgcccgggctttgcccgggcggcctcagtgagcgagcgagcgcgcagctgcctgcagg

SEQ ID NO: 916 - DNA, 4009 bp, Artificial Sequence
  source: /note="Description of Artificial Sequence: Synthetic polynucleotide"
aagatgacggtttgtcacatggagttggcaggatgtttgattaaaaacataacaggaagaaaaatgccccgctgtgggcggacaaaatagttgggaactgggaggggtggaaatggagtttttaaggattatttagggaagagtgacaaaatagatgggaactgggtgtagcgtcgtaagctaatacgaaaattaaaaatgacaaaatagtttggaactagatttcacttatctggttcggatctcctaggcgatatcagtgatcacggatctcgaccaattgacattattgaagcaactagtatcgattttatcagggttattgtctcagacctgcaggcagctgcgcgctcgctcgctcactgaggccgcccgggcaaagcccgggcgtcgggcgacctttggtcgcccggcctcagtgagcgagcgagcgcgcagagagggagtggccaactccatcactaggggttcctagatctgatatcggcgcgcccctgggcgcgcccgagtccaacacccgtgggaatcccatgggcaccatggcccctcgctccaaaaatgctttcgcgtcgcgcagacactgctcggtagtttcggggatcagcgtttgagtaagagcccgcgtctgaaccctccgcgccgccccggccccagtggaaagacgcgcaggcaaaacgcaccacgtgacggagcgtgaccgcgcgccgagcgcgcgccaaggtcgggcaggaagagggcctatttcccatgattccttcatatttgcatatacgatacaaggctgttagagagataattagaattaatttgactgtaaacacaaagatattagtacaaaatacgtgacgtagaaagtaataatttcttgggtagtttgcagttttaaaattatgttttaaaatggactatcatatgcttaccgtaacttgaaagtatttcgatttcttggctttatatatcttgtggaaaggacgaaacaccgcaccagagtaacagtctgaggtttaagagctatgctggaaacagcatagcaagtttaaataaggctagtccgttatcaacttgaaaaagtggcaccgagtcggtgctttttttgcggccgcgctcggcgcgcccatatttgcatgtcgctatgtgttctgggaaatcaccataaacgtgaaatgtctttggatttgggaatcttataagttctgtatgagaccacggtacaccgcaccagagtaacagtctgaggtttaagagctatgctggaaacagcatagcaagtttaaataaggctagtccgttatcaacttgaaaaagtggcaccgagtcggtgctttttttgcggccgctgacggcgcgccctgcagtatttagcatgccccacccatctgcaaggcattctggatagtgtcaaaacagccggaaatcaagtccgtttatctcaaactttagcattttgggaataaatgatatttgctatgctggttaaattagattttagttaaatttcctgctgaagctctagtacgataagtaacttgacctaagtgtaaagttgagatttccttcaggtttatatagcttgtgcgccgcctgggtacaccgcaccagagtaacagtctgaggtttaagagctatgctggaaacagcatagcaagtttaaataaggctagtccgttatcaacttgaaaaagtggcaccgagtcggtgctttttttgcggccgcgctgtttaaaccaacaaaatcagcagctaatgaaggcaagtcagcaggtcactcatcattttccacttcggcaatgcagtgggattattccaacagaggtttttcacagcattccttcagttaactggagatcgaatcttgattttcacagatatacttggcaaggtccgccctgtcatcagcacattcaagcagatctccatggcagcattccgtgtggacttaggtaagatctgtcactaacttggaaacttctgcaaactcagcttagggaaatctctggctcaggcgagctactgcctcagcttagaaagctctttctccaaattattggagactggcacacttaagtccctgttaggcagacgaagccttcccttcatcccgaagttcatcgagctttggcaacaggcaggcagctttatcagcagcttggcaacattctgtaaaagcagctttatacctttaagcaaagaaaaggagttccggggcataaaagtaaggatgtcttctggcaatttataataagtattttttcaaaaatgtctcttcattgtcatgaaaagcagtgcatcacacatcaacctctggtctcaccaatcgggggaggtttgggttgtttacttagtgttgcaagaattattttattctctcaggttcttgttttgcacagcagtcagctcattcaccataggtttcacgaagagttgctgcggccgcctcgataatacgactcactatagggtcgacgatatcagatctaggaacccctagtgatggagttggccactccctctctgcgcgctcgctcgctcactgaggccgggcgaccaaaggtcgcccgacgcccgggctttgcccgggcggcctcagtgagcgagcgagcgcgcagctgcctgcaggcatgcaagctgtagccaaccactagaactatagctagagtcctgggcgaacaaacgatgctcgccttccagaaaaccgaggatgcgaaccacttcatccggggtcagcaccaccggcaagcgccgcgacggccgaggtcttccgatctcctgaagccagggcagatccgtgcacagcaccttgccgtagaagaacagcaaggccgccaatgcctgacgatgcgtggagaccgaaaccttgcgctcgttcgccagccaggacagaaatgcctcgacttcgctgctgcccaaggttgccgggtgacgcacaccgtggaaacggatgaaggcacgaacccagttgacataagcctgttcggttcgtaaactgtaatgcaagtagcgtatgcgctcacgcaactggtccagaaccttgaccgaacgcagcggtggtaacggcgcagtggcggttttcatggcttgttatgactgtttttttgtacagtctatgcctcgggcatccaagcagcaagcgcgttacgccgtgggtcgatgtttgatgttatggagcagcaacgatgttacgcagcagcaacgatgttacgcagcagggcagtcgccctaaaacaaagttaggtggctcaagtatgggcatcattcgcacatgtaggctcggccctgaccaagtcaaatccatgcgggctgctcttgatcttttcggtcgtgagttcggagacgtagccacctactcccaacatcagccggactccgattacctcgggaacttgctccgtagtaagacattcatcgcgcttgctgccttcgaccaagaagcggttgttggcgctctcgcggcttacgttctgcccaagtttgagcagccgcgtagtgagatctatatctatgatctcgcagtctccggcgagcaccggaggcagggcattgccaccgcgctcatcaatctcctcaagcatgaggccaacgcgcttggtgcttatgtgatctacgtgcaagcagattacggtgacgatcccgcagtggctctctatacaaagttgggcatacgggaagaagtgatgcactttgatatcgacccaagtaccgccacctaacaattcgttcaagccgagatcggcttcccggccgcggagttgttcggtaaattgtcacaacgccgcgaatatagtctttaccatgcccttggccacgcccctctttaatacgacgggcaatttgcacttcagaaaatgaagagtttgctttagccataacaaaagtccagtatgctttttcacagcataactggactgatttcagtttacaactattctgtctagtttaagactttattgtcatagtttagatctattttgttcagtttaagactttattgtccgcccacacccgcttacgc

SEQ ID NO: 917 - DNA, 4009 bp, Artificial Sequence
  source: /note="Description of Artificial Sequence: Synthetic polynucleotide"
aagatgacggtttgtcacatggagttggcaggatgtttgattaaaaacataacaggaagaaaaatgccccgctgtgggcggacaaaatagttgggaactgggaggggtggaaatggagtttttaaggattatttagggaagagtgacaaaatagatgggaactgggtgtagcgtcgtaagctaatacgaaaattaaaaatgacaaaatagtttggaactagatttcacttatctggttcggatctcctaggcgatatcagtgatcacggatctcgaccaattgacattattgaagcaactagtatcgattttatcagggttattgtctcagaccactccctctatgcgcgctcgctcactcactcggccctggagaccaaaggtctccagactgccggcctctggccggcagggccgagtgagtgagcgagcgcgcatagagggagtgggtacctccatcatctaggtttgccagatctgatatcggcgcgcccctgggcgcgcccgagtccaacacccgtgggaatcccatgggcaccatggcccctcgctccaaaaatgctttcgcgtcgcgcagacactgctcggtagtttcggggatcagcgtttgagtaagagcccgcgtctgaaccctccgcgccgccccggccccagtggaaagacgcgcaggcaaaacgcaccacgtgacggagcgtgaccgcgcgccgagcgcgcgccaaggtcgggcaggaagagggcctatttcccatgattccttcatatttgcatatacgatacaaggctgttagagagataattagaattaatttgactgtaaacacaaagatattagtacaaaatacgtgacgtagaaagtaataatttcttgggtagtttgcagttttaaaattatgttttaaaatggactatcatatgcttaccgtaacttgaaagtatttcgatttcttggctttatatatcttgtggaaaggacgaaacaccgcaccagagtaacagtctgaggtttaagagctatgctggaaacagcatagcaagtttaaataaggctagtccgttatcaacttgaaaaagtggcaccgagtcggtgctttttttgcggccgcgctcggcgcgcccatatttgcatgtcgctatgtgttctgggaaatcaccataaacgtgaaatgtctttggatttgggaatcttataagttctgtatgagaccacggtacaccgcaccagagtaacagtctgaggtttaagagctatgctggaaacagcatagcaagtttaaataaggctagtccgttatcaacttgaaaaagtggcaccgagtcggtgctttttttgcggccgctgacggcgcgccctgcagtatttagcatgccccacccatctgcaaggcattctggatagtgtcaaaacagccggaaatcaagtccgtttatctcaaactttagcattttgggaataaatgatatttgctatgctggttaaattagattttagttaaatttcctgctgaagctctagtacgataagtaacttgacctaagtgtaaagttgagatttccttcaggtttatatagcttgtgcgccgcctgggtacaccgcaccagagtaacagtctgaggtttaagagctatgctggaaacagcatagcaagtttaaataaggctagtccgttatcaacttgaaaaagtggcaccgagtcggtgctttttttgcggccgcgctgtttaaaccaacaaaatcagcagctaatgaaggcaagtcagcaggtcactcatcattttccacttcggcaatgcagtgggattattccaacagaggtttttcacagcattccttcagttaactggagatcgaatcttgattttcacagatatacttggcaaggtccgccctgtcatcagcacattcaagcagatctccatggcagcattccgtgtggacttaggtaagatctgtcactaacttggaaacttctgcaaactcagcttagggaaatctctggctcaggcgagctactgcctcagcttagaaagctctttctccaaattattggagactggcacacttaagtccctgttaggcagacgaagccttcccttcatcccgaagttcatcgagctttggcaacaggcaggcagctttatcagcagcttggcaacattctgtaaaagcagctttatacctttaagcaaagaaaaggagttccggggcataaaagtaaggatgtcttctggcaatttataataagtattttttcaaaaatgtctcttcattgtcatgaaaagcagtgcatcacacatcaacctctggtctcaccaatcgggggaggtttgggttgtttacttagtgttgcaagaattattttattctctcaggttcttgttttgcacagcagtcagctcattcaccataggtttcacgaagagttgctgcggccgcctcgataatacgactcactatagggtcgacgatatcagatctaggaacccctagtgatggagttggccactccctctctgcgcgctcgctcgctcactgaggccgcccgggcaaagcccgggcgtcgggcgacctttggtcgcccggcctcagtgagcgagcgagcgcgcagagagggagtggcatgcaagctgtagccaaccactagaactatagctagagtcctgggcgaacaaacgatgctcgccttccagaaaaccgaggatgcgaaccacttcatccggggtcagcaccaccggcaagcgccgcgacggccgaggtcttccgatctcctgaagccagggcagatccgtgcacagcaccttgccgtagaagaacagcaaggccgccaatgcctgacgatgcgtggagaccgaaaccttgcgctcgttcgccagccaggacagaaatgcctcgacttcgctgctgcccaaggttgccgggtgacgcacaccgtggaaacggatgaaggcacgaacccagttgacataagcctgttcggttcgtaaactgtaatgcaagtagcgtatgcgctcacgcaactggtccagaaccttgaccgaacgcagcggtggtaacggcgcagtggcggttttcatggcttgttatgactgtttttttgtacagtctatgcctcgggcatccaagcagcaagcgcgttacgccgtgggtcgatgtttgatgttatggagcagcaacgatgttacgcagcagcaacgatgttacgcagcagggcagtcgccctaaaacaaagttaggtggctcaagtatgggcatcattcgcacatgtaggctcggccctgaccaagtcaaatccatgcgggctgctcttgatcttttcggtcgtgagttcggagacgtagccacctactcccaacatcagccggactccgattacctcgggaacttgctccgtagtaagacattcatcgcgcttgctgccttcgaccaagaagcggttgttggcgctctcgcggcttacgttctgcccaagtttgagcagccgcgtagtgagatctatatctatgatctcgcagtctccggcgagcaccggaggcagggcattgccaccgcgctcatcaatctcctcaagcatgaggccaacgcgcttggtgcttatgtgatctacgtgcaagcagattacggtgacgatcccgcagtggctctctatacaaagttgggcatacgggaagaagtgatgcactttgatatcgacccaagtaccgccacctaacaattcgttcaagccgagatcggcttcccggccgcggagttgttcggtaaattgtcacaacgccgcgaatatagtctttaccatgcccttggccacgcccctctttaatacgacgggcaatttgcacttcagaaaatgaagagtttgctttagccataacaaaagtccagtatgctttttcacagcataactggactgatttcagtttacaactattctgtctagtttaagactttattgtcatagtttagatctattttgttcagtttaagactttattgtccgcccacacccgcttacgc

SEQ ID NO: 918 - DNA, 2285 bp, Artificial Sequence
  source: /note="Description of Artificial Sequence: Synthetic polynucleotide"
ccactccctctatgcgcgctcgctcactcactcggccctggagaccaaaggtctccagactgccggcctctggccggcagggccgagtgagtgagcgagcgcgcatagagggagtgggtacctccatcatctaggtttgccagatctgatatcggcgcgcccctgggcgcgcccgagtccaacacccgtgggaatcccatgggcaccatggcccctcgctccaaaaatgctttcgcgtcgcgcagacactgctcggtagtttcggggatcagcgtttgagtaagagcccgcgtctgaaccctccgcgccgccccggccccagtggaaagacgcgcaggcaaaacgcaccacgtgacggagcgtgaccgcgcgccgagcgcgcgccaaggtcgggcaggaagagggcctatttcccatgattccttcatatttgcatatacgatacaaggctgttagagagataattagaattaatttgactgtaaacacaaagatattagtacaaaatacgtgacgtagaaagtaataatttcttgggtagtttgcagttttaaaattatgttttaaaatggactatcatatgcttaccgtaacttgaaagtatttcgatttcttggctttatatatcttgtggaaaggacgaaacaccgcaccagagtaacagtctgacgtttaagagctatgctggaaacagcatagcaagtttaaataaggctagtccgttatcaacttgaaaaagtggcaccgagtcggtgctttttttgcggccgcgctcggcgcgcccatatttgcatgtcgctatgtgttctgggaaatcaccataaacgtgaaatgtctttggatttgggaatcttataagttctgtatgagaccacggtacaccgcaccagagtaacagtctgacgtttaagagctatgctggaaacagcatagcaagtttaaataaggctagtccgttatcaacttgaaaaagtggcaccgagtcggtgctttttttgcggccgctgacggcgcgccctgcagtatttagcatgccccacccatctgcaaggcattctggatagtgtcaaaacagccggaaatcaagtccgtttatctcaaactttagcattttgggaataaatgatatttgctatgctggttaaattagattttagttaaatttcctgctgaagctctagtacgataagtaacttgacctaagtgtaaagttgagatttccttcaggtttatatagcttgtgcgccgcctgggtacaccgcaccagagtaacagtctgacgtttaagagctatgctggaaacagcatagcaagtttaaataaggctagtccgttatcaacttgaaaaagtggcaccgagtcggtgctttttttgcggccgcgctgtttaaaccaacaaaatcagcagctaatgaaggcaagtcagcaggtcactcatcattttccacttcggcaatgcagtgggattattccaacagaggtttttcacagcattccttcagttaactggagatcgaatcttgattttcacagatatacttggcaaggtccgccctgtcatcagcacattcaagcagatctccatggcagcattccgtgtggacttaggtaagatctgtcactaacttggaaacttctgcaaactcagcttagggaaatctctggctcaggcgagctactgcctcagcttagaaagctctttctccaaattattggagactggcacacttaagtccctgttaggcagacgaagccttcccttcatcccgaagttcatcgagctttggcaacaggcaggcagctttatcagcagcttggcaacattctgtaaaagcagctttatacctttaagcaaagaaaaggagttccggggcataaaagtaaggatgtcttctggcaatttataataagtattttttcaaaaatgtctcttcattgtcatgaaaagcagtgcatcacacatcaacctctggtctcaccaatcgggggaggtttgggttgtttacttagtgttgcaagaattattttattctctcaggttcttgttttgcacagcagtcagctcattcaccataggtttcacgaagagttgctgcggccgcctcgataatacgactcactatagggtcgacgatatcagatctaggaacccctagtgatggagttggccactccctctctgcgcgctcgctcgctcactgaggccgcccgggcaaagcccgggcgtcgggcgacctttggtcgcccggcctcagtgagcgagcgagcgcgcagagagggagtgg

SEQ ID NO: 919 - DNA, 2285 bp, Artificial Sequence
  source: /note="Description of Artificial Sequence: Synthetic polynucleotide"
cctgcaggcagctgcgcgctcgctcgctcactgaggccgcccgggcaaagcccgggcgtcgggcgacctttggtcgcccggcctcagtgagcgagcgagcgcgcagagagggagtggccaactccatcactaggggttcctagatctgatatcggcgcgcccctgggcgcgcccgagtccaacacccgtgggaatcccatgggcaccatggcccctcgctccaaaaatgctttcgcgtcgcgcagacactgctcggtagtttcggggatcagcgtttgagtaagagcccgcgtctgaaccctccgcgccgccccggccccagtggaaagacgcgcaggcaaaacgcaccacgtgacggagcgtgaccgcgcgccgagcgcgcgccaaggtcgggcaggaagagggcctatttcccatgattccttcatatttgcatatacgatacaaggctgttagagagataattagaattaatttgactgtaaacacaaagatattagtacaaaatacgtgacgtagaaagtaataatttcttgggtagtttgcagttttaaaattatgttttaaaatggactatcatatgcttaccgtaacttgaaagtatttcgatttcttggctttatatatcttgtggaaaggacgaaacaccgcaccagagtaacagtctgacgtttaagagctatgctggaaacagcatagcaagtttaaataaggctagtccgttatcaacttgaaaaagtggcaccgagtcggtgctttttttgcggccgcgctcggcgcgcccatatttgcatgtcgctatgtgttctgggaaatcaccataaacgtgaaatgtctttggatttgggaatcttataagttctgtatgagaccacggtacaccgcaccagagtaacagtctgacgtttaagagctatgctggaaacagcatagcaagtttaaataaggctagtccgttatcaacttgaaaaagtggcaccgagtcggtgctttttttgcggccgctgacggcgcgccctgcagtatttagcatgccccacccatctgcaaggcattctggatagtgtcaaaacagccggaaatcaagtccgtttatctcaaactttagcattttgggaataaatgatatttgctatgctggttaaattagattttagttaaatttcctgctgaagctctagtacgataagtaacttgacctaagtgtaaagttgagatttccttcaggtttatatagcttgtgcgccgcctgggtacaccgcaccagagtaacagtctgacgtttaagagctatgctggaaacagcatagcaagtttaaataaggctagtccgttatcaacttgaaaaagtggcaccgagtcggtgctttttttgcggccgcgctgtttaaaccaacaaaatcagcagctaatgaaggcaagtcagcaggtcactcatcattttccacttcggcaatgcagtgggattattccaacagaggtttttcacagcattccttcagttaactggagatcgaatcttgattttcacagatatacttggcaaggtccgccctgtcatcagcacattcaagcagatctccatggcagcattccgtgtggacttaggtaagatctgtcactaacttggaaacttctgcaaactcagcttagggaaatctctggctcaggcgagctactgcctcagcttagaaagctctttctccaaattattggagactggcacacttaagtccctgttaggcagacgaagccttcccttcatcccgaagttcatcgagctttggcaacaggcaggcagctttatcagcagcttggcaacattctgtaaaagcagctttatacctttaagcaaagaaaaggagttccggggcataaaagtaaggatgtcttctggcaatttataataagtattttttcaaaaatgtctcttcattgtcatgaaaagcagtgcatcacacatcaacctctggtctcaccaatcgggggaggtttgggttgtttacttagtgttgcaagaattattttattctctcaggttcttgttttgcacagcagtcagctcattcaccataggtttcacgaagagttgctgcggccgcctcgataatacgactcactatagggtcgacgatatcagatctaggaacccctagtgatggagttggccactccctctctgcgcgctcgctcgctcactgaggccgggcgaccaaaggtcgcccgacgcccgggctttgcccgggcggcctcagtgagcgagcgagcgcgcagctgcctgcagg

SEQ ID NO: 920 - DNA, 4009 bp, Artificial Sequence
  source: /note="Description of Artificial Sequence: Synthetic polynucleotide"
aagatgacggtttgtcacatggagttggcaggatgtttgattaaaaacataacaggaagaaaaatgccccgctgtgggcggacaaaatagttgggaactgggaggggtggaaatggagtttttaaggattatttagggaagagtgacaaaatagatgggaactgggtgtagcgtcgtaagctaatacgaaaattaaaaatgacaaaatagtttggaactagatttcacttatctggttcggatctcctaggcgatatcagtgatcacggatctcgaccaattgacattattgaagcaactagtatcgattttatcagggttattgtctcagacctgcaggcagctgcgcgctcgctcgctcactgaggccgcccgggcaaagcccgggcgtcgggcgacctttggtcgcccggcctcagtgagcgagcgagcgcgcagagagggagtggccaactccatcactaggggttcctagatctgatatcggcgcgcccctgggcgcgcccgagtccaacacccgtgggaatcccatgggcaccatggcccctcgctccaaaaatgctttcgcgtcgcgcagacactgctcggtagtttcggggatcagcgtttgagtaagagcccgcgtctgaaccctccgcgccgccccggccccagtggaaagacgcgcaggcaaaacgcaccacgtgacggagcgtgaccgcgcgccgagcgcgcgccaaggtcgggcaggaagagggcctatttcccatgattccttcatatttgcatatacgatacaaggctgttagagagataattagaattaatttgactgtaaacacaaagatattagtacaaaatacgtgacgtagaaagtaataatttcttgggtagtttgcagttttaaaattatgttttaaaatggactatcatatgcttaccgtaacttgaaagtatttcgatttcttggctttatatatcttgtggaaaggacgaaacaccgcaccagagtaacagtctgacgtttaagagctatgctggaaacagcatagcaagtttaaataaggctagtccgttatcaacttgaaaaagtggcaccgagtcggtgctttttttgcggccgcgctcggcgcgcccatatttgcatgtcgctatgtgttctgggaaatcaccataaacgtgaaatgtctttggatttgggaatcttataagttctgtatgagaccacggtacaccgcaccagagtaacagtctgacgtttaagagctatgctggaaacagcatagcaagtttaaataaggctagtccgttatcaacttgaaaaagtggcaccgagtcggtgctttttttgcggccgctgacggcgcgccctgcagtatttagcatgccccacccatctgcaaggcattctggatagtgtcaaaacagccggaaatcaagtccgtttatctcaaactttagcattttgggaataaatgatatttgctatgctggttaaattagattttagttaaatttcctgctgaagctctagtacgataagtaacttgacctaagtgtaaagttgagatttccttcaggtttatatagcttgtgcgccgcctgggtacaccgcaccagagtaacagtctgacgtttaagagctatgctggaaacagcatagcaagtttaaataaggctagtccgttatcaacttgaaaaagtggcaccgagtcggtgctttttttgcggccgcgctgtttaaaccaacaaaatcagcagctaatgaaggcaagtcagcaggtcactcatcattttccacttcggcaatgcagtgggattattccaacagaggtttttcacagcattccttcagttaactggagatcgaatcttgattttcacagatatacttggcaaggtccgccctgtcatcagcacattcaagcagatctccatggcagcattccgtgtggacttaggtaagatctgtcactaacttggaaacttctgcaaactcagcttagggaaatctctggctcaggcgagctactgcctcagcttagaaagctctttctccaaattattggagactggcacacttaagtccctgttaggcagacgaagccttcccttcatcccgaagttcatcgagctttggcaacaggcaggcagctttatcagcagcttggcaacattctgtaaaagcagctttatacctttaagcaaagaaaaggagttccggggcataaaagtaaggatgtcttctggcaatttataataagtattttttcaaaaatgtctcttcattgtcatgaaaagcagtgcatcacacatcaacctctggtctcaccaatcgggggaggtttgggttgtttacttagtgttgcaagaattattttattctctcaggttcttgttttgcacagcagtcagctcattcaccataggtttcacgaagagttgctgcggccgcctcgataatacgactcactatagggtcgacgatatcagatctaggaacccctagtgatggagttggccactccctctctgcgcgctcgctcgctcactgaggccgggcgaccaaaggtcgcccgacgcccgggctttgcccgggcggcctcagtgagcgagcgagcgcgcagctgcctgcaggcatgcaagctgtagccaaccactagaactatagctagagtcctgggcgaacaaacgatgctcgccttccagaaaaccgaggatgcgaaccacttcatccggggtcagcaccaccggcaagcgccgcgacggccgaggtcttccgatctcctgaagccagggcagatccgtgcacagcaccttgccgtagaagaacagcaaggccgccaatgcctgacgatgcgtggagaccgaaaccttgcgctcgttcgccagccaggacagaaatgcctcgacttcgctgctgcccaaggttgccgggtgacgcacaccgtggaaacggatgaaggcacgaacccagttgacataagcctgttcggttcgtaaactgtaatgcaagtagcgtatgcgctcacgcaactggtccagaaccttgaccgaacgcagcggtggtaacggcgcagtggcggttttcatggcttgttatgactgtttttttgtacagtctatgcctcgggcatccaagcagcaagcgcgttacgccgtgggtcgatgtttgatgttatggagcagcaacgatgttacgcagcagcaacgatgttacgcagcagggcagtcgccctaaaacaaagttaggtggctcaagtatgggcatcattcgcacatgtaggctcggccctgaccaagtcaaatccatgcgggctgctcttgatcttttcggtcgtgagttcggagacgtagccacctactcccaacatcagccggactccgattacctcgggaacttgctccgtagtaagacattcatcgcgcttgctgccttcgaccaagaagcggttgttggcgctctcgcggcttacgttctgcccaagtttgagcagccgcgtagtgagatctatatctatgatctcgcagtctccggcgagcaccggaggcagggcattgccaccgcgctcatcaatctcctcaagcatgaggccaacgcgcttggtgcttatgtgatctacgtgcaagcagattacggtgacgatcccgcagtggctctctatacaaagttgggcatacgggaagaagtgatgcactttgatatcgacccaagtaccgccacctaacaattcgttcaagccgagatcggcttcccggccgcggagttgttcggtaaattgtcacaacgccgcgaatatagtctttaccatgcccttggccacgcccctctttaatacgacgggcaatttgcacttcagaaaatgaagagtttgctttagccataacaaaagtccagtatgctttttcacagcataactggactgatttcagtttacaactattctgtctagtttaagactttattgtcatagtttagatctattttgttcagtttaagactttattgtccgcccacacccgcttacgc

SEQ ID NO: 921 - DNA, 4009 bp, Artificial Sequence
  source: /note="Description of Artificial Sequence: Synthetic polynucleotide"
aagatgacggtttgtcacatggagttggcaggatgtttgattaaaaacataacaggaagaaaaatgccccgctgtgggcggacaaaatagttgggaactgggaggggtggaaatggagtttttaaggattatttagggaagagtgacaaaatagatgggaactgggtgtagcgtcgtaagctaatacgaaaattaaaaatgacaaaatagtttggaactagatttcacttatctggttcggatctcctaggcgatatcagtgatcacggatctcgaccaattgacattattgaagcaactagtatcgattttatcagggttattgtctcagaccactccctctatgcgcgctcgctcactcactcggccctggagaccaaaggtctccagactgccggcctctggccggcagggccgagtgagtgagcgagcgcgcatagagggagtgggtacctccatcatctaggtttgccagatctgatatcggcgcgcccctgggcgcgcccgagtccaacacccgtgggaatcccatgggcaccatggcccctcgctccaaaaatgctttcgcgtcgcgcagacactgctcggtagtttcggggatcagcgtttgagtaagagcccgcgtctgaaccctccgcgccgccccggccccagtggaaagacgcgcaggcaaaacgcaccacgtgacggagcgtgaccgcgcgccgagcgcgcgccaaggtcgggcaggaagagggcctatttcccatgattccttcatatttgcatatacgatacaaggctgttagagagataattagaattaatttgactgtaaacacaaagatattagtacaaaatacgtgacgtagaaagtaataatttcttgggtagtttgcagttttaaaattatgttttaaaatggactatcatatgcttaccgtaacttgaaagtatttcgatttcttggctttatatatcttgtggaaaggacgaaacaccgcaccagagtaacagtctgacgtttaagagctatgctggaaacagcatagcaagtttaaataaggctagtccgttatcaacttgaaaaagtggcaccgagtcggtgctttttttgcggccgcgctcggcgcgcccatatttgcatgtcgctatgtgttctgggaaatcaccataaacgtgaaatgtctttggatttgggaatcttataagttctgtatgagaccacggtacaccgcaccagagtaacagtctgacgtttaagagctatgctggaaacagcatagcaagtttaaataaggctagtccgttatcaacttgaaaaagtggcaccgagtcggtgctttttttgcggccgctgacggcgcgccctgcagtatttagcatgccccacccatctgcaaggcattctggatagtgtcaaaacagccggaaatcaagtccgtttatctcaaactttagcattttgggaataaatgatatttgctatgctggttaaattagattttagttaaatttcctgctgaagctctagtacgataagtaacttgacctaagtgtaaagttgagatttccttcaggtttatatagcttgtgcgccgcctgggtacaccgcaccagagtaacagtctgacgtttaagagctatgctggaaacagcatagcaagtttaaataaggctagtccgttatcaacttgaaaaagtggcaccgagtcggtgctttttttgcggccgcgctgtttaaaccaacaaaatcagcagctaatgaaggcaagtcagcaggtcactcatcattttccacttcggcaatgcagtgggattattccaacagaggtttttcacagcattccttcagttaactggagatcgaatcttgattttcacagatatacttggcaaggtccgccctgtcatcagcacattcaagcagatctccatggcagcattccgtgtggacttaggtaagatctgtcactaacttggaaacttctgcaaactcagcttagggaaatctctggctcaggcgagctactgcctcagcttagaaagctctttctccaaattattggagactggcacacttaagtccctgttaggcagacgaagccttcccttcatcccgaagttcatcgagctttggcaacaggcaggcagctttatcagcagcttggcaacattctgtaaaagcagctttatacctttaagcaaagaaaaggagttccggggcataaaagtaaggatgtcttctggcaatttataataagtattttttcaaaaatgtctcttcattgtcatgaaaagcagtgcatcacacatcaacctctggtctcaccaatcgggggaggtttgggttgtttacttagtgttgcaagaattattttattctctcaggttcttgttttgcacagcagtcagctcattcaccataggtttcacgaagagttgctgcggccgcctcgataatacgactcactatagggtcgacgatatcagatctaggaacccctagtgatggagttggccactccctctctgcgcgctcgctcgctcactgaggccgcccgggcaaagcccgggcgtcgggcgacctttggtcgcccggcctcagtgagcgagcgagcgcgcagagagggagtggcatgcaagctgtagccaaccactagaactatagctagagtcctgggcgaacaaacgatgctcgccttccagaaaaccgaggatgcgaaccacttcatccggggtcagcaccaccggcaagcgccgcgacggccgaggtcttccgatctcctgaagccagggcagatccgtgcacagcaccttgccgtagaagaacagcaaggccgccaatgcctgacgatgcgtggagaccgaaaccttgcgctcgttcgccagccaggacagaaatgcctcgacttcgctgctgcccaaggttgccgggtgacgcacaccgtggaaacggatgaaggcacgaacccagttgacataagcctgttcggttcgtaaactgtaatgcaagtagcgtatgcgctcacgcaactggtccagaaccttgaccgaacgcagcggtggtaacggcgcagtggcggttttcatggcttgttatgactgtttttttgtacagtctatgcctcgggcatccaagcagcaagcgcgttacgccgtgggtcgatgtttgatgttatggagcagcaacgatgttacgcagcagcaacgatgttacgcagcagggcagtcgccctaaaacaaagttaggtggctcaagtatgggcatcattcgcacatgtaggctcggccctgaccaagtcaaatccatgcgggctgctcttgatcttttcggtcgtgagttcggagacgtagccacctactcccaacatcagccggactccgattacctcgggaacttgctccgtagtaagacattcatcgcgcttgctgccttcgaccaagaagcggttgttggcgctctcgcggcttacgttctgcccaagtttgagcagccgcgtagtgagatctatatctatgatctcgcagtctccggcgagcaccggaggcagggcattgccaccgcgctcatcaatctcctcaagcatgaggccaacgcgcttggtgcttatgtgatctacgtgcaagcagattacggtgacgatcccgcagtggctctctatacaaagttgggcatacgggaagaagtgatgcactttgatatcgacccaagtaccgccacctaacaattcgttcaagccgagatcggcttcccggccgcggagttgttcggtaaattgtcacaacgccgcgaatatagtctttaccatgcccttggccacgcccctctttaatacgacgggcaatttgcacttcagaaaatgaagagtttgctttagccataacaaaagtccagtatgctttttcacagcataactggactgatttcagtttacaactattctgtctagtttaagactttattgtcatagtttagatctattttgttcagtttaagactttattgtccgcccacacccgcttacgc

SEQ ID NO: 922 - DNA, 472 bp, Artificial Sequence
  source: /note="Description of Artificial Sequence: Synthetic polynucleotide"
cgagtccaacacccgtgggaatcccatgggcaccatggcccctcgctccaaaaatgctttcgcgtcgcgcagacactgctcggtagtttcggggatcagcgtttgagtaagagcccgcgtctgaaccctccgcgccgccccggccccagtggaaagacgcgcaggcaaaacgcaccacgtgacggagcgtgaccgcgcgccgagcgcgcgccaaggtcgggcaggaagagggcctatttcccatgattccttcatatttgcatatacgatacaaggctgttagagagataattagaattaatttgactgtaaacacaaagatattagtacaaaatacgtgacgtagaaagtaataatttcttgggtagtttgcagttttaaaattatgttttaaaatggactatcatatgcttaccgtaacttgaaagtatttcgatttcttggctttatatatcttgtggaaaggacgaaa

SEQ ID NO: 923 - DNA, 108 bp, Artificial Sequence
  source: /note="Description of Artificial Sequence: Synthetic polynucleotide"
gctcggcgcgcccatatttgcatgtcgctatgtgttctgggaaatcaccataaacgtgaaatgtctttggatttgggaatcttataagttctgtatgagaccacggta

SEQ ID NO: 924 - DNA, 251 bp, Artificial Sequence
  source: /note="Description of Artificial Sequence: Synthetic polynucleotide"
tgacggcgcgccctgcagtatttagcatgccccacccatctgcaaggcattctggatagtgtcaaaacagccggaaatcaagtccgtttatctcaaactttagcattttgggaataaatgatatttgctatgctggttaaattagattttagttaaatttcctgctgaagctctagtacgataagtaacttgacctaagtgtaaagttgagatttccttcaggtttatatagcttgtgcgccgcctgggta

SEQ ID NO: 925 - DNA, 251 bp, Artificial Sequence; identical to SEQ ID NO: 924
  source: /note="Description of Artificial Sequence: Synthetic polynucleotide"

SEQ ID NO: 926 - DNA, 26 bp, Artificial Sequence
  source: /note="Description of Artificial Sequence: Synthetic primer"
caccgaaatgatgagtgaagttatat

SEQ ID NO: 927 - DNA, 26 bp, Artificial Sequence
  source: /note="Description of Artificial Sequence: Synthetic primer"
aaacatataacttcactcatcatttc

SEQ ID NO: 928 - DNA, 25 bp, Artificial Sequence
  source: /note="Description of Artificial Sequence: Synthetic primer"
caccggtttgttcaaaagcgtggct

SEQ ID NO: 929 - DNA, 24 bp, Artificial Sequence
  source: /note="Description of Artificial Sequence: Synthetic primer"
aaacagccacgcttttgaacaaac

SEQ ID NO: 930 - DNA, 45 bp, Artificial Sequence
  source: /note="Description of Artificial Sequence: Synthetic primer"
gaattgtaatacgactcactataggaatgatgagtgaagttatat

SEQ ID NO: 931 - DNA, 45 bp, Artificial Sequence
  source: /note="Description of Artificial Sequence: Synthetic primer"
gaattgtaatacgactcactatagggtttgttcaaaagcgtggct

SEQ ID NO: 932 - DNA, 22 bp, Artificial Sequence
  source: /note="Description of Artificial Sequence: Synthetic primer"
aaaagcaccgactcggtgccac

SEQ ID NO: 933 - DNA, 24 bp, Artificial Sequence
  source: /note="Description of Artificial Sequence: Synthetic primer"
caccggacacaatgtaggaagcct

SEQ ID NO: 934 - DNA, 24 bp, Artificial Sequence
  source: /note="Description of Artificial Sequence: Synthetic primer"
aaacaggcttcctacattgtgtcc

SEQ ID NO: 935 - DNA, 40 bp, Artificial Sequence
  source: /note="Description of Artificial Sequence: Synthetic primer"
gaattgtaatacgactcactggacacaatgtaggaagcct

SEQ ID NO: 936 - DNA, 22 bp, Artificial Sequence
  source: /note="Description of Artificial Sequence: Synthetic primer"
aaaagcaccgactcggtgccac

SEQ ID NO: 937 - DNA, 25 bp, Artificial Sequence
  source: /note="Description of Artificial Sequence: Synthetic primer"
ggattgactgaaatgatggccaagg

SEQ ID NO: 938 - DNA, 24 bp, Artificial Sequence
  source: /note="Description of Artificial Sequence: Synthetic primer"
ctgccacgattactctgcttccag

SEQ ID NO: 939 - DNA, 20 bp, Artificial Sequence
  source: /note="Description of Artificial Sequence: Synthetic primer"
agcaggcagagaaggtggta

SEQ ID NO: 940 - DNA, 22 bp, Artificial Sequence
  source: /note="Description of Artificial Sequence: Synthetic primer"
gggcgtatctcttcatagcctt

SEQ ID NO: 941 - DNA, 20 bp, Artificial Sequence
  source: /note="Description of Artificial Sequence: Synthetic primer"
gcgtgtgtgtttgtttaggg

SEQ ID NO: 942 - DNA, 24 bp, Artificial Sequence
  source: /note="Description of Artificial Sequence: Synthetic primer"
caccgagagtaacagtctgactgg

SEQ ID NO: 943 - DNA, 25 bp, Artificial Sequence
  source: /note="Description of Artificial Sequence: Synthetic primer"
aaacgtcagactgttactctagtgc

SEQ ID NO: 944 - DNA, 25 bp, Artificial Sequence
  source: /note="Description of Artificial Sequence: Synthetic primer"
caccgcactagagtaacagtctgac

SEQ ID NO: 945 - DNA, 24 bp, Artificial Sequence
  source: /note="Description of Artificial Sequence: Synthetic primer"
aaacccagtcagactgttactctc

SEQ ID NO: 946 - DNA, 141 bp, Artificial Sequence
  source: /note="Description of Artificial Sequence: Synthetic polynucleotide"
aggaacccctagtgatggagttggccactccctctctgcgcgctcgctcgctcactgaggccgcccgggcaaagcccgggcgtcgggcgacctttggtcgcccggcctcagtgagcgagcgagcgcgcagagagggagtgg

SEQ ID NO: 947 - DNA, 20 bp, Homo sapiens
cagagtaacagtctgagtag

SEQ ID NO: 948 - DNA, 20 bp, Artificial Sequence
  source: /note="Description of Artificial Sequence: Synthetic oligonucleotide"
cgctgcccaatgccatcctg

SEQ ID NO: 949 - DNA, 20 bp, Artificial Sequence
  source: /note="Description of Artificial Sequence: Synthetic oligonucleotide"
atcttacaggaactccagga

SEQ ID NO: 950 - DNA, 20 bp, Artificial Sequence
  source: /note="Description of Artificial Sequence: Synthetic oligonucleotide"
aggaactccaggatggcatt

SEQ ID NO: 951 - DNA, 18 bp, Artificial Sequence
  source: /note="Description of Artificial Sequence: Synthetic oligonucleotide"
cgctgcccaatgccatcc

SEQ ID NO: 952 - DNA, 20 bp, Artificial Sequence
  source: /note="Description of Artificial Sequence: Synthetic oligonucleotide"
gttttaaaatttttatatta

SEQ ID NO: 953 - DNA, 20 bp, Artificial Sequence
  source: /note="Description of Artificial Sequence: Synthetic oligonucleotide"
ttttatattacagaatataa

SEQ ID NO: 954 - DNA, 20 bp, Artificial Sequence
  source: /note="Description of Artificial Sequence: Synthetic oligonucleotide"
tatgtgttacctacccttgt

SEQ ID NO: 955 - DNA, 20 bp, Artificial Sequence
  source: /note="Description of Artificial Sequence: Synthetic oligonucleotide"
gtacaaggaccgacaagggt

SEQ ID NO: 956 - RNA, 20 nt, Artificial Sequence
  source: /note="Description of Artificial Sequence: Synthetic oligonucleotide"
caggauggcauugggcagcg

SEQ ID NO: 957 - RNA, 20 nt, Artificial Sequence
  source: /note="Description of Artificial Sequence: Synthetic oligonucleotide"
uccuggaguuccuguaagau

SEQ ID NO: 958 - RNA, 20 nt, Artificial Sequence
  source: /note="Description of Artificial Sequence: Synthetic oligonucleotide"
aaugccauccuggaguuccu

SEQ ID NO: 959 - RNA, 18 nt, Artificial Sequence
  source: /note="Description of Artificial Sequence: Synthetic oligonucleotide"
ggauggcauugggcagcg

SEQ ID NO: 960 - RNA, 20 nt, Artificial Sequence
  source: /note="Description of Artificial Sequence: Synthetic oligonucleotide"
uaauauaaaaauuuuaaaac

SEQ ID NO: 961 - RNA, 20 nt, Artificial Sequence
  source: /note="Description of Artificial Sequence: Synthetic oligonucleotide"
uuauauucuguaauauaaaa

SEQ ID NO: 962 - RNA, 20 nt, Artificial Sequence
  source: /note="Description of Artificial Sequence: Synthetic oligonucleotide"
acaaggguagguaacacaua

SEQ ID NO: 963 - RNA, 20 nt, Artificial Sequence
  source: /note="Description of Artificial Sequence: Synthetic oligonucleotide"
acccuugucgguccuuguac

SEQ ID NO: 964 - RNA, 20 nt, Artificial Sequence
  source: /note="Description of Artificial Sequence: Synthetic oligonucleotide"
cgcugcccaaugccauccug

SEQ ID NO: 965 - RNA, 20 nt, Artificial Sequence
  source: /note="Description of Artificial Sequence: Synthetic oligonucleotide"
aucuuacaggaacuccagga

SEQ ID NO: 966 - RNA, 20 nt, Artificial Sequence
  source: /note="Description of Artificial Sequence: Synthetic oligonucleotide"
aggaacuccaggauggcauu

SEQ ID NO: 967 - RNA, 18 nt, Artificial Sequence
  source: /note="Description of Artificial Sequence: Synthetic oligonucleotide"
cgcugcccaaugccaucc

SEQ ID NO: 968 - RNA, 20 nt, Artificial Sequence
  source: /note="Description of Artificial Sequence: Synthetic oligonucleotide"
guuuuaaaauuuuuauauua

SEQ ID NO: 969 - RNA, 20 nt, Artificial Sequence
  source: /note="Description of Artificial Sequence: Synthetic oligonucleotide"
uuuuauauuacagaauauaa

SEQ ID NO: 970 - RNA, 20 nt, Artificial Sequence
  source: /note="Description of Artificial Sequence: Synthetic oligonucleotide"
uauguguuaccuacccuugu

SEQ ID NO: 971 - RNA, 20 nt, Artificial Sequence
  source: /note="Description of Artificial Sequence: Synthetic oligonucleotide"
guacaaggaccgacaagggu

SEQ ID NO: 972 - DNA, 24 bp, Artificial Sequence
  source: /note="Description of Artificial Sequence: Synthetic oligonucleotide"
tctttttcttcttttttccttttt

SEQ ID NO: 973 - DNA, 24 bp, Artificial Sequence
  source: /note="Description of Artificial Sequence: Synthetic oligonucleotide"
ctttttcttcttttttcctttttg

SEQ ID NO: 974 - DNA, 24 bp, Artificial Sequence
  source: /note="Description of Artificial Sequence: Synthetic oligonucleotide"
tttttcttcttttttcctttttgc

SEQ ID NO: 975 - DNA, 24 bp, Artificial Sequence
  source: /note="Description of Artificial Sequence: Synthetic oligonucleotide"
tcttcttttttcctttttgcaaaa

SEQ ID NO: 976 - DNA, 24 bp, Artificial Sequence
  source: /note="Description of Artificial Sequence: Synthetic oligonucleotide"
cttcttttttcctttttgcaaaaa

SEQ ID NO: 977 - DNA, 24 bp, Artificial Sequence
  source: /note="Description of Artificial Sequence: Synthetic oligonucleotide"
ttcttttttcctttttgcaaaaac

SEQ ID NO: 978 - DNA, 24 bp, Artificial Sequence
  source: /note="Description of Artificial Sequence: Synthetic oligonucleotide"
ttcctttttgcaaaaacccaaaat

SEQ ID NO: 979 - DNA, 24 bp, Artificial Sequence
  source: /note="Description of Artificial Sequence: Synthetic oligonucleotide"
tcctttttgcaaaaacccaaaata

SEQ ID NO: 980 - DNA, 24 bp, Artificial Sequence
  source: /note="Description of Artificial Sequence: Synthetic oligonucleotide"
cctttttgcaaaaacccaaaatat

SEQ ID NO: 981 - DNA, 24 bp, Artificial Sequence
  source: /note="Description of Artificial Sequence: Synthetic oligonucleotide"
ctttttgcaaaaacccaaaatatt

SEQ ID NO: 982 - DNA, 24 bp, Artificial Sequence
  source: /note="Description of Artificial Sequence: Synthetic oligonucleotide"
tgcaaaaacccaaaatattttagc

SEQ ID NO: 983 - DNA, 24 bp, Artificial Sequence
  source: /note="Description of Artificial Sequence: Synthetic oligonucleotide"
gcaaaaacccaaaatattttagct

SEQ ID NO: 984 - DNA, 24 bp, Artificial Sequence
  source: /note="Description of Artificial Sequence: Synthetic oligonucleotide"
caaaaacccaaaatattttagctc

SEQ ID NO: 985 - DNA, 24 bp, Artificial Sequence
  source: /note="Description of Artificial Sequence: Synthetic oligonucleotide"
agctcctactcagactgttactct

SEQ ID NO: 986 - DNA, 24 bp, Artificial Sequence
  source: /note="Description of Artificial Sequence: Synthetic oligonucleotide"
gctcctactcagactgttactctg

SEQ ID NO: 987 - DNA, 24 bp, Artificial Sequence
  source: /note="Description of Artificial Sequence: Synthetic oligonucleotide"
cttagtaaccacaggttgtgtcac

SEQ ID NO: 988 - DNA, 24 bp, Artificial Sequence
  source: /note="Description of Artificial Sequence: Synthetic oligonucleotide"
gagatggcagtttccttagtaacc

SEQ ID NO: 989-998 - skipped (10 entries)

SEQ ID NO: 999 - DNA, 24 bp, Artificial Sequence
  source: /note="Description of Artificial Sequence: Synthetic oligonucleotide"
tagtttggagatggcagtttcctt

SEQ ID NO: 1000 - DNA, 24 bp, Artificial Sequence
  source: /note="Description of Artificial Sequence: Synthetic oligonucleotide"
ttctcataccttctgcttgatgat

SEQ ID NO: 1001 - DNA, 24 bp, Artificial Sequence
  source: /note="Description of Artificial Sequence: Synthetic oligonucleotide"
tcattttttctcataccttctgct

SEQ ID NO: 1002 - DNA, 24 bp, Artificial Sequence
  source: /note="Description of Artificial Sequence: Synthetic oligonucleotide"
atcattttttctcataccttctgc

SEQ ID NO: 1003 - DNA, 24 bp, Artificial Sequence
  source: /note="Description of Artificial Sequence: Synthetic oligonucleotide"
aagaaaaacttctgccaactttta

SEQ ID NO: 1004 - DNA, 24 bp, Artificial Sequence
  source: /note="Description of Artificial Sequence: Synthetic oligonucleotide"
aaagaaaaacttctgccaactttt

SEQ ID NO: 1005 - DNA, 24 bp, Artificial Sequence
  source: /note="Description of Artificial Sequence: Synthetic oligonucleotide"
tctttaaaatgaagattttccacc

SEQ ID NO: 1006 - DNA, 24 bp, Artificial Sequence
  source: /note="Description of Artificial Sequence: Synthetic oligonucleotide"
ctttaaaatgaagattttccacca

SEQ ID NO: 1007 - DNA, 24 bp, Artificial Sequence
  source: /note="Description of Artificial Sequence: Synthetic oligonucleotide"
tttaaaatgaagattttccaccaa

SEQ ID NO: 1008 - DNA, 24 bp, Artificial Sequence
  source: /note="Description of Artificial Sequence: Synthetic oligonucleotide"
aaatgaagattttccaccaatcac

SEQ ID NO: 1009 - DNA, 24 bp, Artificial Sequence
  source: /note="Description of Artificial Sequence: Synthetic oligonucleotide"
ccaccaatcactttactctcctag

SEQ ID NO: 1010 - DNA, 24 bp, Artificial Sequence
  source: /note="Description of Artificial Sequence: Synthetic oligonucleotide"
caccaatcactttactctcctaga

SEQ ID NO: 1011 - DNA, 24 bp, Artificial Sequence
  source: /note="Description of Artificial Sequence: Synthetic oligonucleotide"
ctctcctagaccatttcccaccag

SEQ ID NO: 1012 - DNA, 24 bp, Artificial Sequence
  source: /note="Description of Artificial Sequence: Synthetic oligonucleotide"
agaaaagattaaacagtgtgctac

SEQ ID NO: 1013 - DNA, 24 bp, Artificial Sequence
  source: /note="Description of Artificial Sequence: Synthetic oligonucleotide"
tttgagaaaagattaaacagtgtg

SEQ ID NO: 1014 - DNA, 24 bp, Artificial Sequence
  source: /note="Description of Artificial Sequence: Synthetic oligonucleotide"
atttgagaaaagattaaacagtgt

SEQ ID NO: 1015 - DNA, 24 bp, Artificial Sequence
  source: /note="Description of Artificial Sequence: Synthetic oligonucleotide"
tatttgagaaaagattaaacagtg

SEQ ID NO: 1016 - DNA, 24 bp, Artificial Sequence
  source: /note="Description of Artificial Sequence: Synthetic oligonucleotide"
atcttttctcaaataaaaagacat

SEQ ID NO: 1017 - DNA, 24 bp, Artificial Sequence
  source: /note="Description of Artificial Sequence: Synthetic oligonucleotide"
ctcaaataaaaagacatggggctt

SEQ ID NO: 1018 - DNA, 24 bp, Artificial Sequence
  source: /note="Description of Artificial Sequence: Synthetic oligonucleotide"
tcaaataaaaagacatggggcttc

SEQ ID NO: 1019 - DNA, 24 bp, Artificial Sequence
  source: /note="Description of Artificial Sequence: Synthetic oligonucleotide"
tgttttgcctttttggtatcttac

SEQ ID NO: 1020 - DNA, 24 bp, Artificial Sequence
  source: /note="Description of Artificial Sequence: Synthetic oligonucleotide"
gttttgcctttttggtatcttaca

SEQ ID NO: 1021 - DNA, 24 bp, Artificial Sequence
  source: /note="Description of Artificial Sequence: Synthetic oligonucleotide"
ttttgcctttttggtatcttacag

SEQ ID NO: 1022 - DNA, 24 bp, Artificial Sequence
  source: /note="Description of Artificial Sequence: Synthetic oligonucleotide"
gcctttttggtatcttacaggaac

SEQ ID NO: 1023 - DNA, 24 bp, Artificial Sequence
  source: /note="Description of Artificial Sequence: Synthetic oligonucleotide"
cctttttggtatcttacaggaact

SEQ ID NO: 1024 - DNA, 24 bp, Artificial Sequence
  source: /note="Description of Artificial Sequence: Synthetic oligonucleotide"
tggtatcttacaggaactccagga

SEQ ID NO: 1025 - DNA, 24 bp, Artificial Sequence
  source: /note="Description of Artificial Sequence: Synthetic oligonucleotide"
ggtatcttacaggaactccaggat

SEQ ID NO: 1026 - DNA, 24 bp, Artificial Sequence
  source: /note="Description of Artificial Sequence: Synthetic oligonucleotide"
aggattgctgaattatttcttccc

SEQ ID NO: 1027 - DNA, 24 bp, Artificial Sequence
  source: /note="Description of Artificial Sequence: Synthetic oligonucleotide"
gaggattgctgaattatttcttcc

SEQ ID NO: 1028 - DNA, 24 bp, Artificial Sequence
  source: /note="Description of Artificial Sequence: Synthetic oligonucleotide"
tgaggattgctgaattatttcttc

SEQ ID NO: 1029 - DNA, 24 bp, Artificial Sequence
  source: /note="Description of Artificial Sequence: Synthetic oligonucleotide"
ctgtagaatactggcatctgtttt

SEQ ID NO: 1030 - DNA, 24 bp, Artificial Sequence
  source: /note="Description of Artificial Sequence: Synthetic oligonucleotide"
cctgtagaatactggcatctgttt

SEQ ID NO: 1031 - DNA, 24 bp, Artificial Sequence
  source: /note="Description of Artificial Sequence: Synthetic oligonucleotide"
tcctgtagaatactggcatctgtt

SEQ ID NO: 1032 - DNA, 24 bp, Artificial Sequence
  source: /note="Description of Artificial Sequence: Synthetic oligonucleotide"
cagacctcctgccaccgcagattc

SEQ ID NO: 1033 - DNA, 24 bp, Artificial Sequence
  source: /note="Description of Artificial Sequence: Synthetic oligonucleotide"
tgtctgacagctgtttgcagacct

SEQ ID NO: 1034 - DNA, 24 bp, Artificial Sequence
  source: /note="Description of Artificial Sequence: Synthetic oligonucleotide"
ctgtctgacagctgtttgcagacc

SEQ ID NO: 1035 - DNA, 24 bp, Artificial Sequence
  source: /note="Description of Artificial Sequence: Synthetic oligonucleotide"
tctgtctgacagctgtttgcagac

SEQ ID NO: 1036 - DNA, 24 bp, Artificial Sequence
  source: /note="Description of Artificial Sequence: Synthetic oligonucleotide"
ttctgtctgacagctgtttgcaga

SEQ ID NO: 1037 - DNA, 24 bp, Artificial Sequence
  source: /note="Description of Artificial Sequence: Synthetic oligonucleotide"
attcctattagatctgtcgcccta

SEQ ID NO: 1038 - DNA, 24 bp, Artificial Sequence
  source: /note="Description of Artificial Sequence: Synthetic oligonucleotide"
cattcctattagatctgtcgccct

SEQ ID NO: 1039 - DNA, 24 bp, Artificial Sequence
  source: /note="Description of Artificial Sequence: Synthetic oligonucleotide"
agcagactttttaagctttcttta

SEQ ID NO: 1040 - DNA, 24 bp, Artificial Sequence
  source: /note="Description of Artificial Sequence: Synthetic oligonucleotide"
gcagactttttaagctttctttag

SEQ ID NO: 1041 - DNA, 24 bp, Artificial Sequence
  source: /note="Description of Artificial Sequence: Synthetic oligonucleotide"
taagctttctttagaagaatattt

SEQ ID NO: 1042 - DNA, 24 bp, Artificial Sequence
  source: /note="Description of Artificial Sequence: Synthetic oligonucleotide"
aagctttctttagaagaatatttc

SEQ ID NO: 1043 - DNA, 24 bp, Artificial Sequence
  source: /note="Description of Artificial Sequence: Synthetic oligonucleotide"
agctttctttagaagaatatttca

SEQ ID NO: 1044 - DNA, 24 bp, Artificial Sequence
  source: /note="Description of Artificial Sequence: Synthetic oligonucleotide"
tttagaagaatatttcatgagaga

SEQ ID NO: 1045 - DNA, 24 bp, Artificial Sequence
  source: /note="Description of Artificial Sequence: Synthetic oligonucleotide"
gaagaatatttcatgagagattat

SEQ ID NO: 1046 - DNA, 24 bp, Artificial Sequence
  source: /note="Description of Artificial Sequence: Synthetic oligonucleotide"
tcagtataaccaaaaaatatacgc

SEQ ID NO: 1047 - DNA, 24 bp, Artificial Sequence
  source: /note="Description of Artificial Sequence: Synthetic oligonucleotide"
acataatccatctatttttcttga

SEQ ID NO: 1048 - DNA, 24 bp, Artificial Sequence
  source: /note="Description of Artificial Sequence: Synthetic oligonucleotide"
cataatccatctatttttcttgat

SEQ ID NO: 1049 - DNA, 24 bp, Artificial Sequence
  source: /note="Description of Artificial Sequence: Synthetic oligonucleotide"
tcttgatccatatgcttttacctg

SEQ ID NO: 1050 - DNA, 24 bp, Artificial Sequence
  source: /note="Description of Artificial Sequence: Synthetic oligonucleotide"
cttgatccatatgcttttacctgc

SEQ ID NO: 1051 - DNA, 24 bp, Artificial Sequence
  source: /note="Description of Artificial Sequence: Synthetic oligonucleotide"
ttgatccatatgcttttacctgca

SEQ ID NO: 1052 - DNA, 24 bp, Artificial Sequence
  source: /note="Description of Artificial Sequence: Synthetic oligonucleotide"
tcaacagatctgtcaaatcgcctg

SEQ ID NO: 1053 - DNA, 24 bp, Artificial Sequence
  source: /note="Description of Artificial Sequence: Synthetic oligonucleotide"
acctgcaggcgatttgacagatct

SEQ ID NO: 1054 - DNA, 24 bp, Artificial Sequence
  source: /note="Description of Artificial Sequence: Synthetic oligonucleotide"
cctgcaggcgatttgacagatctg

SEQ ID NO: 1055 - DNA, 24 bp, Artificial Sequence
  source: /note="Description of Artificial Sequence: Synthetic oligonucleotide"
acagatctgttgagaaatggcggc

SEQ ID NO: 1056 - DNA, 24 bp, Artificial Sequence
  source: /note="Description of Artificial Sequence: Synthetic oligonucleotide"
tatcataatgaaaacgccgccatt

SEQ ID NO: 1057 - DNA, 24 bp, Artificial Sequence
  source: /note="Description of Artificial Sequence: Synthetic oligonucleotide"
cattatgatataaagatatttaat

SEQ ID NO: 1058 - DNA, 24 bp, Artificial Sequence
  source: /note="Description of Artificial Sequence: Synthetic oligonucleotide"
tatttagcatgttcccaattctca

SEQ ID NO: 1059 - DNA, 24 bp, Artificial Sequence
  source: /note="Description of Artificial Sequence: Synthetic oligonucleotide"
gaaaaaacaaatcaaagacttacc

SEQ ID NO: 1060 - DNA, 24 bp, Artificial Sequence
  source: /note="Description of Artificial Sequence: Synthetic oligonucleotide"
atttgttttttcgaaattgtattt

SEQ ID NO: 1061 - DNA, 24 bp, Artificial Sequence
  source: /note="Description of Artificial Sequence: Synthetic oligonucleotide"
ttttttcgaaattgtatttatctt

SEQ ID NO: 1062 - DNA, 24 bp, Artificial Sequence
  source: /note="Description of Artificial Sequence: Synthetic oligonucleotide"
ttcgaaattgtatttatcttcagc

SEQ ID NO: 1063 - DNA, 24 bp, Artificial Sequence
  source: /note="Description of Artificial Sequence: Synthetic oligonucleotide"
tcgaaattgtatttatcttcagca

SEQ ID NO: 1064 - DNA, 24 bp, Artificial Sequence
  source: /note="Description of Artificial Sequence: Synthetic oligonucleotide"
cgaaattgtatttatcttcagcac

SEQ ID NO: 1065 - DNA, 24 bp, Artificial Sequence
  source: /note="Description of Artificial Sequence: Synthetic oligonucleotide"
gaaattgtatttatcttcagcaca

SEQ ID NO: 1066 - DNA, 24 bp, Artificial Sequence
  source: /note="Description of Artificial Sequence: Synthetic oligonucleotide"
agaagttaaagagtccagatgtgc

SEQ ID NO: 1067 - DNA, 24 bp, Artificial Sequence
  source: /note="Description of Artificial Sequence: Synthetic oligonucleotide"
tcttcagcacatctggactcttta

SEQ ID NO: 1068 - DNA, 24 bp, Artificial Sequence
  source: /note="Description of Artificial Sequence: Synthetic oligonucleotide"
catcacccttcagaacctgatctt

SEQ ID NO: 1069 - DNA, 24 bp, Artificial Sequence
  source: /note="Description of Artificial Sequence: Synthetic oligonucleotide"
acttcttaaagatcaggttctgaa

SEQ ID NO: 1070 - DNA, 24 bp, Artificial Sequence
  source: /note="Description of Artificial Sequence: Synthetic oligonucleotide"
gactgttgttgtcatcattatatt

SEQ ID NO: 1071 - DNA, 24 bp, Artificial Sequence
  source: /note="Description of Artificial Sequence: Synthetic oligonucleotide"
actgttgttgtcatcattatatta

SEQ ID NO: 1072 - DNA, 24 bp, Artificial Sequence
  source: /note="Description of Artificial Sequence: Synthetic oligonucleotide"
aactagaataaaaggaaaaataaa

SEQ ID NO: 1073 - DNA, 24 bp, Artificial Sequence
  source: /note="Description of Artificial Sequence: Synthetic oligonucleotide"
ctactatatatttatttttccttt

SEQ ID NO: 1074 - DNA, 24 bp, Artificial Sequence
  source: /note="Description of Artificial Sequence: Synthetic oligonucleotide"
tttttccttttattctagttgaaa

SEQ ID NO: 1075 - DNA, 24 bp, Artificial Sequence
  source: /note="Description of Artificial Sequence: Synthetic oligonucleotide"
tccttttattctagttgaaagaat

SEQ ID NO: 1076 - DNA, 24 bp, Artificial Sequence
  source: /note="Description of Artificial Sequence: Synthetic oligonucleotide"
ccttttattctagttgaaagaatt

SEQ ID NO: 1077 - DNA, 24 bp, Artificial Sequence
  source: /note="Description of Artificial Sequence: Synthetic oligonucleotide"
cttttattctagttgaaagaattc

SEQ ID NO: 1078 - DNA, 24 bp, Artificial Sequence
  source: /note="Description of Artificial Sequence: Synthetic oligonucleotide"
attctagttgaaagaattcagaat

SEQ ID NO: 1079 - DNA, 24 bp, Artificial Sequence
  source: /note="Description of Artificial Sequence: Synthetic oligonucleotide"
ttctagttgaaagaattcagaatc

SEQ ID NO: 1080 - DNA, 24 bp, Artificial Sequence
  source: /note="Description of Artificial Sequence: Synthetic oligonucleotide"
attcaactgttgcctccggttctg

SEQ ID NO: 1081 - DNA, 24 bp, Artificial Sequence
  source: /note="Description of Artificial Sequence: Synthetic oligonucleotide"
acatttcattcaactgttgcctcc

SEQ ID NO: 1082 - DNA, 24 bp, Artificial Sequence
  source: /note="Description of Artificial Sequence: Synthetic oligonucleotide"
cttttggattgcatctactgtata

SEQ ID NO: 1083 - DNA, 24 bp, Artificial Sequence
  source: /note="Description of Artificial Sequence: Synthetic oligonucleotide"
tgtgattttcttttggattgcatc

SEQ ID NO: 1084 - DNA, 24 bp, Artificial Sequence
  source: /note="Description of Artificial Sequence: Synthetic oligonucleotide"
atactaaccttggtttctgtgatt

SEQ ID NO: 1085 - DNA, 24 bp, Artificial Sequence
  source: /note="Description of Artificial Sequence: Synthetic oligonucleotide"
aaaaggtatctttgatactaacct

SEQ ID NO: 1086 - DNA, 24 bp, Artificial Sequence
  source: /note="Description of Artificial Sequence: Synthetic oligonucleotide"
aaaaaggtatctttgatactaacc

SEQ ID NO: 1087 - DNA, 24 bp, Artificial Sequence
  source: /note="Description of Artificial Sequence: Synthetic oligonucleotide"
ttttaaaaaggtatctttgatact

SEQ ID NO: 1088 - DNA, 24 bp, Artificial Sequence
  source: /note="Description of Artificial Sequence: Synthetic oligonucleotide"
attttaaaaaggtatctttgatac

SEQ ID NO: 1089 - DNA, 24 bp, Artificial Sequence
  source: /note="Description of Artificial Sequence: Synthetic oligonucleotide"
ttaatgcaaactgggacacaaaca

SEQ ID NO: 1090 - DNA, 24 bp, Artificial Sequence
  source: /note="Description of Artificial Sequence: Synthetic oligonucleotide"
taaattgccatgtttgtgtcccag

SEQ ID NO: 1091 - DNA, 24 bp, Artificial Sequence
  source: /note="Description of Artificial Sequence: Synthetic oligonucleotide"
aaattgccatgtttgtgtcccagt

SEQ ID NO: 1092 - DNA, 24 bp, Artificial Sequence
  source: /note="Description of Artificial Sequence: Synthetic oligonucleotide"
aattgccatgtttgtgtcccagtt

SEQ ID NO: 1093 - DNA, 24 bp, Artificial Sequence
  source: /note="Description of Artificial Sequence: Synthetic oligonucleotide"
tgtcccagtttgcattaacaaata

SEQ ID NO: 1094 - DNA, 24 bp, Artificial Sequence
  source: /note="Description of Artificial Sequence: Synthetic oligonucleotide"
caacatagttctcaaactatttgt

SEQ ID NO: 1095 - DNA, 24 bp, Artificial Sequence
  source: /note="Description of Artificial Sequence: Synthetic oligonucleotide"
ccaacatagttctcaaactatttg

SEQ ID NO: 1096 - DNA, 24 bp, Artificial Sequence
  source: /note="Description of Artificial Sequence: Synthetic oligonucleotide"
tccaacatagttctcaaactattt

SEQ ID NO: 1097 - DNA, 24 bp, Artificial Sequence
  source: /note="Description of Artificial Sequence: Synthetic oligonucleotide"
tttccaacatagttctcaaactat

SEQ ID NO: 1098 - DNA, 24 bp, Artificial Sequence
  source: /note="Description of Artificial Sequence: Synthetic oligonucleotide"
ttttccaacatagttctcaaacta

SEQ ID NO: 1099 - DNA, 24 bp, Artificial Sequence
  source: /note="Description of Artificial Sequence: Synthetic oligonucleotide"
tttttccaacatagttctcaaact

SEQ ID NO: 1100 - DNA, 24 bp, Artificial Sequence
  source: /note="Description of Artificial Sequence: Synthetic oligonucleotide"
cattaacaaatagtttgagaacta

SEQ ID NO: 1101 - DNA, 24 bp, Artificial Sequence
  source: /note="Description of Artificial Sequence: Synthetic oligonucleotide"
agaactatgttggaaaaaaaaata

SEQ ID NO: 1102 - DNA, 24 bp, Artificial Sequence
  source: /note="Description of Artificial Sequence: Synthetic oligonucleotide"
gttcttctagcctggagaaagaag

SEQ ID NO: 1103 - DNA, 24 bp, Artificial Sequence
  source: /note="Description of Artificial Sequence: Synthetic oligonucleotide"
attcttctttctccaggctagaag

SEQ ID NO: 1104 - DNA, 24 bp, Artificial Sequence
  source: /note="Description of Artificial Sequence: Synthetic oligonucleotide"
ttcttctttctccaggctagaaga

SEQ ID NO: 1105 - DNA, 24 bp, Artificial Sequence
  source: /note="Description of Artificial Sequence: Synthetic oligonucleotide"
tccaggctagaagaacaaaagaat

SEQ ID NO: 1106 - DNA, 24 bp, Artificial Sequence
  source: /note="Description of Artificial Sequence: Synthetic oligonucleotide"
aaattctgacaagatattcttttg

SEQ ID NO: 1107 - DNA, 24 bp, Artificial Sequence
  source: /note="Description of Artificial Sequence: Synthetic oligonucleotide"
cttttagttgctgctcttttccag

SEQ ID NO: 1108 - DNA, 24 bp, Artificial Sequence
  source: /note="Description of Artificial Sequence: Synthetic oligonucleotide"
agaaaataaaattaccttgacttg

SEQ ID NO: 1109 - DNA, 24 bp, Artificial Sequence
  source: /note="Description of Artificial Sequence: Synthetic oligonucleotide"
tgcaagcaggccctgggggatttg

SEQ ID NO: 1110 - DNA, 24 bp, Artificial Sequence
  source: /note="Description of Artificial Sequence: Synthetic oligonucleotide"
attttctcaaatcccccagggcct

SEQ ID NO: 1111 - DNA, 24 bp, Artificial Sequence
  source: /note="Description of Artificial Sequence: Synthetic oligonucleotide"
ttttctcaaatcccccagggcctg

SEQ ID NO: 1112 - DNA, 24 bp, Artificial Sequence
  source: /note="Description of Artificial Sequence: Synthetic oligonucleotide"
ctcaaatcccccagggcctgcttg

SEQ ID NO: 1113 - DNA, 24 bp, Artificial Sequence
  source: /note="Description of Artificial Sequence: Synthetic oligonucleotide"
tcaaatcccccagggcctgcttgc

SEQ ID NO: 1114 - DNA, 24 bp, Artificial Sequence
  source: /note="Description of Artificial Sequence: Synthetic oligonucleotide"
ttaattcaatcattggttttctgc

SEQ ID NO: 1115 - DNA, 24 bp, Artificial Sequence
  source: /note="Description of Artificial Sequence: Synthetic oligonucleotide"
taattcaatcattggttttctgcc

SEQ ID NO: 1116 - DNA, 24 bp, Artificial Sequence
  source: /note="Description of Artificial Sequence: Synthetic oligonucleotide"
aattcaatcattggttttctgccc

SEQ ID NO: 1117 - DNA, 24 bp, Artificial Sequence
  source: /note="Description of Artificial Sequence: Synthetic oligonucleotide"
attcaatcattggttttctgccca

SEQ ID NO: 1118 - DNA, 24 bp, Artificial Sequence
  source: /note="Description of Artificial Sequence: Synthetic oligonucleotide"
gcaaggaactatgaataacctaat

SEQ ID NO: 1119 - DNA, 24 bp, Artificial Sequence
  source: /note="Description of Artificial Sequence: Synthetic oligonucleotide"
ctgcccattaggttattcatagtt

SEQ ID NO: 1120 - DNA, 24 bp, Artificial Sequence
  source: /note="Description of Artificial Sequence: Synthetic oligonucleotide"
tgcccattaggttattcatagttc

SEQ ID NO: 1121 - DNA, 24 bp, Artificial Sequence
  source: /note="Description of Artificial Sequence: Synthetic oligonucleotide"
tagaaaacaatttaacaggaaata

SEQ ID NO: 1122 - DNA, 24 bp, Artificial Sequence
  source: /note="Description of Artificial Sequence: Synthetic oligonucleotide"
ctgttaaattgttttctataaacc

SEQ ID NO: 1123 - DNA, 24 bp, Artificial Sequence
  source: /note="Description of Artificial Sequence: Synthetic oligonucleotide"
gaaataaaaaagatgttactgtat

SEQ ID NO: 1124 - DNA, 24 bp, Artificial Sequence
  source: /note="Description of Artificial Sequence: Synthetic oligonucleotide"
agaaataaaaaagatgttactgta

SEQ ID NO: 1125 - DNA, 24 bp, Artificial Sequence
  source: /note="Description of Artificial Sequence: Synthetic oligonucleotide"
ctataaacccttatacagtaacat

SEQ ID NO: 1126 - DNA, 24 bp, Artificial Sequence
  source: /note="Description of Artificial Sequence: Synthetic oligonucleotide"
tataaacccttatacagtaacatc

SEQ ID NO: 1127 - DNA, 24 bp, Artificial Sequence
  source: /note="Description of Artificial Sequence: Synthetic oligonucleotide"
ttatttctaaaagtgttttggctg

SEQ ID NO: 1128 - DNA, 24 bp, Artificial Sequence
  source: /note="Description of Artificial Sequence: Synthetic oligonucleotide"
tatttctaaaagtgttttggctgg

SEQ ID NO: 1129 - DNA, 24 bp, Artificial Sequence
  source: /note="Description of Artificial Sequence: Synthetic oligonucleotide"
atttctaaaagtgttttggctggt

SEQ ID NO: 1130 - DNA, 24 bp, Artificial Sequence
  source: /note="Description of Artificial Sequence: Synthetic oligonucleotide"
tttctaaaagtgttttggctggtc

SEQ ID NO: 1131 - DNA, 24 bp, Artificial Sequence
  source: /note="Description of Artificial Sequence: Synthetic oligonucleotide"
taaaagtgttttggctggtctcac

SEQ ID NO: 1132 - DNA, 24 bp, Artificial Sequence
  source: /note="Description of Artificial Sequence: Synthetic oligonucleotide"
cataatacaaagtaaagtacaatt

SEQ ID NO: 1133 - DNA, 24 bp, Artificial Sequence
  source: /note="Description of Artificial Sequence: Synthetic oligonucleotide"
acataatacaaagtaaagtacaat

SEQ ID NO: 1134 - DNA, 24 bp, Artificial Sequence
  source: /note="Description of Artificial Sequence: Synthetic oligonucleotide"
ggctggtctcacaattgtacttta

SEQ ID NO: 1135 - DNA, 24 bp, Artificial Sequence
  source: /note="Description of Artificial Sequence: Synthetic oligonucleotide"
gctggtctcacaattgtactttac

SEQ ID NO: 1136 - DNA, 24 bp, Artificial Sequence
  source: /note="Description of Artificial Sequence: Synthetic oligonucleotide"
ctttgtattatgtaaaaggaatac

SEQ ID NO: 1137 - DNA, 24 bp, Artificial Sequence
  source: /note="Description of Artificial Sequence: Synthetic oligonucleotide"
tattatgtaaaaggaatacacaac

SEQ ID NO: 1138 - DNA, 24 bp, Artificial Sequence
  source: /note="Description of Artificial Sequence: Synthetic oligonucleotide"
ttcttacaggcaacaatgcaggat

SEQ ID NO: 1139 - DNA, 24 bp, Artificial Sequence
  source: /note="Description of Artificial Sequence: Synthetic oligonucleotide"
gaacagaggcgtccccagttggaa

SEQ ID NO: 1140 - DNA, 24 bp, Artificial Sequence
  source: /note="Description of Artificial Sequence: Synthetic oligonucleotide"
ggcagcggtaatgagttcttccaa

SEQ ID NO: 1141 - DNA, 24 bp, Artificial Sequence
  source: /note="Description of Artificial Sequence: Synthetic oligonucleotide"
tcaaattttgggcagcggtaatga

SEQ ID NO: 1142 - DNA, 24 bp, Artificial Sequence
  source: /note="Description of Artificial Sequence: Synthetic oligonucleotide"
aaaaacaagaccagcaatcaagag

SEQ ID NO: 1143 - DNA, 24 bp, Artificial Sequence
  source: /note="Description of Artificial Sequence: Synthetic oligonucleotide"
tgtgtcccatgcttgttaaaaaac

SEQ ID NO: 1144 - DNA, 24 bp, Artificial Sequence
  source: /note="Description of Artificial Sequence: Synthetic oligonucleotide"
ttaacaagcatgggacacacaaag

SEQ ID NO: 1145 - DNA, 24 bp, Artificial Sequence
  source: /note="Description of Artificial Sequence: Synthetic oligonucleotide"
taacaagcatgggacacacaaagc

SEQ ID NO: 1146 - DNA, 24 bp, Artificial Sequence
  source: /note="Description of Artificial Sequence: Synthetic oligonucleotide"
aacaagcatgggacacacaaagca

SEQ ID NO: 1147 - DNA, 24 bp, Artificial Sequence
  source: /note="Description of Artificial Sequence: Synthetic oligonucleotide"
acaagcatgggacacacaaagcaa

SEQ ID NO: 1148 - DNA, 24 bp, Artificial Sequence
  source: /note="Description of Artificial Sequence: Synthetic oligonucleotide"
ttgaaacttgtcatgcatcttgct

SEQ ID NO: 1149 - DNA, 24 bp, Artificial Sequence
  source: /note="Description of Artificial Sequence: Synthetic oligonucleotide"
attgaaacttgtcatgcatcttgc

SEQ ID NO: 1150 - DNA, 24 bp, Artificial Sequence
  source: /note="Description of Artificial Sequence: Synthetic oligonucleotide"
tattgaaacttgtcatgcatcttg

SEQ ID NO: 1151 - DNA, 24 bp, Artificial Sequence
  source: /note="Description of Artificial Sequence: Synthetic oligonucleotide"
aataaaaacttaagttcatatatc

SEQ ID NO: 1152 - DNA, 24 bp, Artificial Sequence
  source: /note="Description of Artificial Sequence: Synthetic oligonucleotide"
gtgaatatattattggatttctat

SEQ ID NO: 1153 - DNA, 24 bp, Artificial Sequence
  source: /note="Description of Artificial Sequence: Synthetic oligonucleotide"
aagataattcatgaacatcttaat

SEQ ID NO: 1154 - DNA, 24 bp, Artificial Sequence
  source: /note="Description of Artificial Sequence: Synthetic oligonucleotide"
acagaaaagcatacacattactta

SEQ ID NO: 1155 - DNA, 24 bp, Artificial Sequence
  source: /note="Description of Artificial Sequence: Synthetic oligonucleotide"
ctgttaaagaggaagttagaagat

SEQ ID NO: 1156 - DNA, 24 bp, Artificial Sequence
  source: /note="Description of Artificial Sequence: Synthetic oligonucleotide"
tgttaaagaggaagttagaagatc

SEQ ID NO: 1157 - DNA, 24 bp, Artificial Sequence
  source: /note="Description of Artificial Sequence: Synthetic oligonucleotide"
ccgccttccactcagagctcagat

SEQ ID NO: 1158 - DNA, 24 bp, Artificial Sequence
  source: /note="Description of Artificial Sequence: Synthetic oligonucleotide"
ccctcagctcttgaagtaaacggt

SEQ ID NO: 1159 - DNA, 24 bp, Artificial Sequence
  source: /note="Description of Artificial Sequence: Synthetic oligonucleotide"
cttcaagagctgagggcaaagcag

SEQ ID NO: 1160 - DNA, 24 bp, Artificial Sequence
  source: /note="Description of Artificial Sequence: Synthetic oligonucleotide"
aacaaatagctagagccaaagaga

SEQ ID NO: 1161 - DNA, 24 bp, Artificial Sequence
  source: /note="Description of Artificial Sequence: Synthetic oligonucleotide"
gaacaaatagctagagccaaagag

SEQ ID NO: 1162 - DNA, 24 bp, Artificial Sequence
  source: /note="Description of Artificial Sequence: Synthetic oligonucleotide"
gctctagctatttgttcaaaagtg

SEQ ID NO: 1163 - DNA, 24 bp, Artificial Sequence
  source: /note="Description of Artificial Sequence: Synthetic oligonucleotide"
ttcaaaagtgcaactatgaagtga

SEQ ID NO: 1164 - DNA, 24 bp, Artificial Sequence
  source: /note="Description of Artificial Sequence: Synthetic oligonucleotide"
tctctcacccagtcatcacttcat

SEQ ID NO: 1165 - DNA, 24 bp, Artificial Sequence
  source: /note="Description of Artificial Sequence: Synthetic oligonucleotide"
ctctctcacccagtcatcacttca

SEQ ID NO: 1166 - DNA, 24 bp, Artificial Sequence
  source: /note="Description of Artificial Sequence: Synthetic oligonucleotide"
tatatatatatatatttttctctt

SEQ ID NO: 1167 - DNA, 24 bp, Artificial Sequence
  source: /note="Description of Artificial Sequence: Synthetic oligonucleotide"
tctctttctatagacagctaattc

SEQ ID NO: 1168 - DNA, 24 bp, Artificial Sequence
  source: /note="Description of Artificial Sequence: Synthetic oligonucleotide"
ctctttctatagacagctaattca

SEQ ID NO: 1169 - DNA, 24 bp, Artificial Sequence
  source: /note="Description of Artificial Sequence: Synthetic oligonucleotide"
aaacagtaaaaaaatgaattagct

SEQ ID NO: 1170 - DNA, 24 bp, Artificial Sequence
  source: /note="Description of Artificial Sequence: Synthetic oligonucleotide"
tctttctatagacagctaattcat

SEQ ID NO: 1171 - DNA, 24 bp, Artificial Sequence
  source: /note="Description of Artificial Sequence: Synthetic oligonucleotide"
aaaacagtaaaaaaatgaattagc

SEQ ID NO: 1172 - DNA, 24 bp, Artificial Sequence
  source: /note="Description of Artificial Sequence: Synthetic oligonucleotide"
tatagacagctaattcattttttt

SEQ ID NO: 1173 - DNA, 24 bp, Artificial Sequence
  source: /note="Description of Artificial Sequence: Synthetic oligonucleotide"
tattctgtaatataaaaattttaa

SEQ ID NO: 1174 - DNA, 24 bp, Artificial Sequence
  source: /note="Description of Artificial Sequence: Synthetic oligonucleotide"
atattctgtaatataaaaatttta

SEQ ID NO: 1175 - DNA, 24 bp, Artificial Sequence
  source: /note="Description of Artificial Sequence: Synthetic oligonucleotide"
tttactgttttaaaatttttatat

SEQ ID NO: 1176 - DNA, 24 bp, Artificial Sequence
  source: /note="Description of Artificial Sequence: Synthetic oligonucleotide"
ttactgttttaaaatttttatatt

SEQ ID NO: 1177 - DNA, 24 bp, Artificial Sequence
  source: /note="Description of Artificial Sequence: Synthetic oligonucleotide"
tactgttttaaaatttttatatta

SEQ ID NO: 1178 - DNA, 24 bp, Artificial Sequence
  source: /note="Description of Artificial Sequence: Synthetic oligonucleotide"
actgttttaaaatttttatattac

SEQ ID NO: 1179 - DNA, 24 bp, Artificial Sequence
  source: /note="Description of Artificial Sequence: Synthetic oligonucleotide"
ctgttttaaaatttttatattaca

SEQ ID NO: 1180 - DNA, 24 bp, Artificial Sequence
  source: /note="Description of Artificial Sequence: Synthetic oligonucleotide"
aaaatttttatattacagaatata

SEQ ID NO: 1181 - DNA, 24 bp, Artificial Sequence
  source: /note="Description of Artificial Sequence: Synthetic oligonucleotide"
aaatttttatattacagaatataa

SEQ ID NO: 1182 - DNA, 24 bp, Artificial Sequence
  source: /note="Description of Artificial Sequence: Synthetic oligonucleotide"
ttgtagactatcttttatattctg

SEQ ID NO: 1183 - DNA, 24 bp, Artificial Sequence
  source: /note="Description of Artificial Sequence: Synthetic oligonucleotide"
tatattacagaatataaaagatag

SEQ ID NO: 1184 - DNA, 24 bp, Artificial Sequence
  source: /note="Description of Artificial Sequence: Synthetic oligonucleotide"
atattacagaatataaaagatagt

SEQ ID NO: 1185 - DNA, 24 bp, Artificial Sequence
  source: /note="Description of Artificial Sequence: Synthetic oligonucleotide"
tattacagaatataaaagatagtc

SEQ ID NO: 1186 - DNA, 24 bp, Artificial Sequence
  source: /note="Description of Artificial Sequence: Synthetic oligonucleotide"
caatgctgctgtcttcttgctatg

SEQ ID NO: 1187 - DNA, 24 bp, Artificial Sequence
  source: /note="Description of Artificial Sequence: Synthetic oligonucleotide"
caatgggaaaaagttaacaaaatg

SEQ ID NO: 1188 - DNA, 24 bp, Artificial Sequence
  source: /note="Description of Artificial Sequence: Synthetic oligonucleotide"
tgcaagtatcaagaaaaatatatg

SEQ ID NO: 1189 - DNA, 24 bp, Artificial Sequence
  source: /note="Description of Artificial Sequence: Synthetic oligonucleotide"
tcttgatacttgcagaaatgattt

SEQ ID NO: 1190 - DNA, 24 bp, Artificial Sequence
  source: /note="Description of Artificial Sequence: Synthetic oligonucleotide"
cttgatacttgcagaaatgatttg

SEQ ID NO: 1191 - DNA, 24 bp, Artificial Sequence
  source: /note="Description of Artificial Sequence: Synthetic oligonucleotide"
ttgatacttgcagaaatgatttgt

SEQ ID NO: 1192 - DNA, 24 bp, Artificial Sequence
  source: /note="Description of Artificial Sequence: Synthetic oligonucleotide"
ttttcagggaactgtagaatttat

SEQ ID NO: 1193 - DNA, 24 bp, Artificial Sequence
  source: /note="Description of Artificial Sequence: Synthetic oligonucleotide"
catggagggtactgaaataaattc

SEQ ID NO: 1194 - DNA, 24 bp, Artificial Sequence
  source: /note="Description of Artificial Sequence: Synthetic oligonucleotide"
ccatggagggtactgaaataaatt

SEQ ID NO: 1195 - DNA, 24 bp, Artificial Sequence
  source: /note="Description of Artificial Sequence: Synthetic oligonucleotide"
cagggaactgtagaatttatttca

SEQ ID NO: 1196 - DNA, 24 bp, Artificial Sequence
  source: /note="Description of Artificial Sequence: Synthetic oligonucleotide"
tccatggagggtactgaaataaat

SEQ ID NO: 1197 - DNA, 24 bp, Artificial Sequence
  source: /note="Description of Artificial Sequence: Synthetic oligonucleotide"
agggaactgtagaatttatttcag

SEQ ID NO: 1198 - DNA, 24 bp, Artificial Sequence
  source: /note="Description of Artificial Sequence: Synthetic oligonucleotide"
ttccatggagggtactgaaataaa

SEQ ID NO: 1199 - DNA, 24 bp, Artificial Sequence
  source: /note="Description of Artificial Sequence: Synthetic oligonucleotide"
cctgtcttttttccatggagggta

SEQ ID NO: 1200 - DNA, 24 bp, Artificial Sequence
  source: /note="Description of Artificial Sequence: Synthetic oligonucleotide"
ccctgtcttttttccatggagggt

SEQ ID NO: 1201 - DNA, 24 bp, Artificial Sequence
  source: /note="Description of Artificial Sequence: Synthetic oligonucleotide"
tccctgtcttttttccatggaggg

SEQ ID NO: 1202 - DNA, 24 bp, Artificial Sequence
  source: /note="Description of Artificial Sequence: Synthetic oligonucleotide"
tttcagtaccctccatggaaaaaa

SEQ ID NO: 1203 - DNA, 24 bp, Artificial Sequence
  source: /note="Description of Artificial Sequence: Synthetic oligonucleotide"
agtaccctccatggaaaaaagaca

SEQ ID NO: 1204 - DNA, 24 bp, Artificial Sequence
  source: /note="Description of Artificial Sequence: Synthetic oligonucleotide"
agtttgcatggttcttgctcaagg

SEQ ID NO: 1205 - DNA, 24 bp, Artificial Sequence
  source: /note="Description of Artificial Sequence: Synthetic oligonucleotide"
ataagaaaatgcattccttgagca

SEQ ID NO: 1206 - DNA, 24 bp, Artificial Sequence
  source: /note="Description of Artificial Sequence: Synthetic oligonucleotide"
cataagaaaatgcattccttgagc

SEQ ID NO: 1207 - DNA, 24 bp, Artificial Sequence
  source: /note="Description of Artificial Sequence: Synthetic oligonucleotide"
catggttcttgctcaaggaatgca

SEQ ID NO: 1208 - DNA, 24 bp, Artificial Sequence
  source: /note="Description of Artificial Sequence: Synthetic oligonucleotide"
acctacatgtggaaataaattttc

SEQ ID NO: 1209 - DNA, 24 bp, Artificial Sequence
  source: /note="Description of Artificial Sequence: Synthetic oligonucleotide"
gacctacatgtggaaataaatttt

SEQ ID NO: 1210 - DNA, 24 bp, Artificial Sequence
  source: /note="Description of Artificial Sequence: Synthetic oligonucleotide"
tgacctacatgtggaaataaattt

SEQ ID NO: 1211 - DNA, 24 bp, Artificial Sequence
  source: /note="Description of Artificial Sequence: Synthetic oligonucleotide"
cttatgaaaatttatttccacatg

SEQ ID NO: 1212 - DNA, 24 bp, Artificial Sequence
  source: /note="Description of Artificial Sequence: Synthetic oligonucleotide"
ttatgaaaatttatttccacatgt

SEQ ID NO: 1213 - DNA, 24 bp, Artificial Sequence
  source: /note="Description of Artificial Sequence: Synthetic oligonucleotide"
attacatttttgacctacatgtgg

SEQ ID NO: 1214 - DNA, 24 bp, Artificial Sequence
  source: /note="Description of Artificial Sequence: Synthetic oligonucleotide"
cattacatttttgacctacatgtg

SEQ ID NO: 1215 - DNA, 24 bp, Artificial Sequence
  source: /note="Description of Artificial Sequence: Synthetic oligonucleotide"
tcattacatttttgacctacatgt

SEQ ID NO: 1216 - DNA, 24 bp, Artificial Sequence
  source: /note="Description of Artificial Sequence: Synthetic oligonucleotide"
tttccacatgtaggtcaaaaatgt

SEQ ID NO: 1217 - DNA, 24 bp, Artificial Sequence
  source: /note="Description of Artificial Sequence: Synthetic oligonucleotide"
cacatgtaggtcaaaaatgtaatg

SEQ ID NO: 1218 - DNA, 24 bp, Artificial Sequence
  source: /note="Description of Artificial Sequence: Synthetic oligonucleotide"
ttgcaatccagccatgatattttt

SEQ ID NO: 1219 - DNA, 24 bp, Artificial Sequence
  source: /note="Description of Artificial Sequence: Synthetic oligonucleotide"
actgttggtttgttgcaatccagc

SEQ ID NO: 1220 - DNA, 24 bp, Artificial Sequence
  source: /note="Description of Artificial Sequence: Synthetic oligonucleotide"
cactgttggtttgttgcaatccag

SEQ ID NO: 1221 - DNA, 24 bp, Artificial Sequence
  source: /note="Description of Artificial Sequence: Synthetic oligonucleotide"
aatgctctcatccatagtcatagg

SEQ ID NO: 1222 - DNA, 24 bp, Artificial Sequence
  source: /note="Description of Artificial Sequence: Synthetic oligonucleotide"
atgtctcagtaatcttcttaccta

SEQ ID NO: 1223 - DNA, 24 bp, Artificial Sequence
  source: /note="Description of Artificial Sequence: Synthetic oligonucleotide"
caagttatttaatgtctcagtaat

SEQ ID NO: 1224 - DNA, 24 bp, Artificial Sequence
  source: /note="Description of Artificial Sequence: Synthetic oligonucleotide"
acaagttatttaatgtctcagtaa

SEQ ID NO: 1225 - DNA, 24 bp, Artificial Sequence
  source: /note="Description of Artificial Sequence: Synthetic oligonucleotide"
gactctgatgacatatttttcccc

SEQ ID NO: 1226 - DNA, 24 bp, Artificial Sequence
  source: /note="Description of Artificial Sequence: Synthetic oligonucleotide"
tccccagtatggttccagatcatg

SEQ ID NO: 1227 - DNA, 24 bp, Artificial Sequence
  source: /note="Description of Artificial Sequence: Synthetic oligonucleotide"
ccccagtatggttccagatcatgt

SEQ ID NO: 1228 - DNA, 24 bp, Artificial Sequence
  source: /note="Description of Artificial Sequence: Synthetic oligonucleotide"
cccagtatggttccagatcatgtc

SEQ ID NO: 1229 - DNA, 24 bp, Artificial Sequence
  source: /note="Description of Artificial Sequence: Synthetic oligonucleotide"
tatttgtctttgtgtatgtgtgta

SEQ ID NO: 1230 - DNA, 24 bp, Artificial Sequence
  source: /note="Description of Artificial Sequence: Synthetic oligonucleotide"
tctttgtgtatgtgtgtatgtgta

SEQ ID NO: 1231 - DNA, 24 bp, Artificial Sequence
  source: /note="Description of Artificial Sequence: Synthetic oligonucleotide"
tgtatgtgtgtatgtgtatgtgtt

SEQ ID NO: 1232 - DNA, 24 bp, Artificial Sequence
  source: /note="Description of Artificial Sequence: Synthetic oligonucleotide"
aggccagacctatttgactggaat

SEQ ID NO: 1233 - DNA, 24 bp, Artificial Sequence
  source: /note="Description of Artificial Sequence: Synthetic oligonucleotide"
ggccagacctatttgactggaata

SEQ ID NO: 1234 - DNA, 24 bp, Artificial Sequence
  source: /note="Description of Artificial Sequence: Synthetic oligonucleotide"
actggaatagtgtggtttgccagc

SEQ ID NO: 1235 - DNA, 24 bp, Artificial Sequence
  source: /note="Description of Artificial Sequence: Synthetic oligonucleotide"
ccagcagtcagccacacaacgact

SEQ ID NO: 1236 - DNA, 24 bp, Artificial Sequence
  source: /note="Description of Artificial Sequence: Synthetic oligonucleotide"
tctatgcctaattgatatctggcg

SEQ ID NO: 1237 - DNA, 24 bp, Artificial Sequence
  source: /note="Description of Artificial Sequence: Synthetic oligonucleotide"
ccaaccttcaggatcgagtagttt

SEQ ID NO: 1238 - DNA, 24 bp, Artificial Sequence
  source: /note="Description of Artificial Sequence: Synthetic oligonucleotide"
tggactaccactgcttttagtatg

SEQ ID NO: 1239 - DNA, 24 bp, Artificial Sequence
  source: /note="Description of Artificial Sequence: Synthetic oligonucleotide"
agtatggtagagtttaatgttttc

SEQ ID NO: 1240 - DNA, 24 bp, Artificial Sequence
  source: /note="Description of Artificial Sequence: Synthetic oligonucleotide"
gtatggtagagtttaatgttttca

SEQ ID NO: 1241 - DNA, 24 bp, Artificial Sequence
  source: /note="Description of Artificial Sequence: Synthetic oligonucleotide"
agactctaaaaggataatgaacaa

SEQ ID NO: 1242 - DNA, 24 bp, Artificial Sequence
  source: /note="Description of Artificial Sequence: Synthetic oligonucleotide"
actttgatttgttcattatccttt

SEQ ID NO: 1243 - DNA, 24 bp, Artificial Sequence
  source: /note="Description of Artificial Sequence: Synthetic oligonucleotide"
tatatttgagactctaaaaggata

SEQ ID NO: 1244 - DNA, 24 bp, Artificial Sequence
  source: /note="Description of Artificial Sequence: Synthetic oligonucleotide"
atttgttcattatccttttagagt

SEQ ID NO: 1245 - DNA, 24 bp, Artificial Sequence
  source: /note="Description of Artificial Sequence: Synthetic oligonucleotide"
gtttctatatttgagactctaaaa

SEQ ID NO: 1246 - DNA, 24 bp, Artificial Sequence
  source: /note="Description of Artificial Sequence: Synthetic oligonucleotide"
ggtttctatatttgagactctaaa

SEQ ID NO: 1247 - DNA, 24 bp, Artificial Sequence
  source: /note="Description of Artificial Sequence: Synthetic oligonucleotide"
tggtttctatatttgagactctaa

SEQ ID NO: 1248 - DNA, 24 bp, Artificial Sequence
  source: /note="Description of Artificial Sequence: Synthetic oligonucleotide"
ttcattatccttttagagtctcaa

SEQ ID NO: 1249 - DNA, 24 bp, Artificial Sequence
  source: /note="Description of Artificial Sequence: Synthetic oligonucleotide"
agagtctcaaatatagaaaccaaa

SEQ ID NO: 1250 - DNA, 24 bp, Artificial Sequence
  source: /note="Description of Artificial Sequence: Synthetic oligonucleotide"
gagtctcaaatatagaaaccaaaa

SEQ ID NO: 1251 - DNA, 24 bp, Artificial Sequence
  source: /note="Description of Artificial Sequence: Synthetic oligonucleotide"
cacttcctggatggcttcaatgct

SEQ ID NO: 1252 - DNA, 24 bp, Artificial Sequence
  source: /note="Description of Artificial Sequence: Synthetic oligonucleotide"
gcctcaacaagtgagcattgaagc

SEQ ID NO: 1253 - DNA, 24 bp, Artificial Sequence
  source: /note="Description of Artificial Sequence: Synthetic oligonucleotide"
cctcaacaagtgagcattgaagcc

SEQ ID NO: 1254 - DNA, 24 bp, Artificial Sequence
  source: /note="Description of Artificial Sequence: Synthetic oligonucleotide"
ggtggccttggcaacatttccact

SEQ ID NO: 1255 - DNA, 24 bp, Artificial Sequence
  source: /note="Description of Artificial Sequence: Synthetic oligonucleotide"
gtcactttaggtggccttggcaac

SEQ ID NO: 1256 - DNA, 24 bp, Artificial Sequence
  source: /note="Description of Artificial Sequence: Synthetic oligonucleotide"
atgatgtaactgaaaatgttcttc

SEQ ID NO: 1257 - DNA, 24 bp, Artificial Sequence
  source: /note="Description of Artificial Sequence: Synthetic oligonucleotide"
cctgttgagaatagtgcatttgat

SEQ ID NO: 1258 - DNA, 24 bp, Artificial Sequence
  source: /note="Description of Artificial Sequence: Synthetic oligonucleotide"
cagttacatcatcaaatgcactat

SEQ ID NO: 1259 - DNA, 24 bp, Artificial Sequence
  source: /note="Description of Artificial Sequence: Synthetic oligonucleotide"
agttacatcatcaaatgcactatt

SEQ ID NO: 1260 - DNA, 24 bp, Artificial Sequence
  source: /note="Description of Artificial Sequence: Synthetic oligonucleotide"
cacactttacctgttgagaatagt

SEQ ID NO: 1261 - DNA, 24 bp, Artificial Sequence
  source: /note="Description of Artificial Sequence: Synthetic oligonucleotide"
ctgttttatatgcatttttaggta

SEQ ID NO: 1262 - DNA, 24 bp, Artificial Sequence
  source: /note="Description of Artificial Sequence: Synthetic oligonucleotide"
tgttttatatgcatttttaggtat

SEQ ID NO: 1263 - DNA, 24 bp, Artificial Sequence
  source: /note="Description of Artificial Sequence: Synthetic oligonucleotide"
atatgcatttttaggtattacgtg

SEQ ID NO: 1264 - DNA, 24 bp, Artificial Sequence
  source: /note="Description of Artificial Sequence: Synthetic oligonucleotide"
tatgcatttttaggtattacgtgc

SEQ ID NO: 1265 - DNA, 24 bp, Artificial Sequence
  source: /note="Description of Artificial Sequence: Synthetic oligonucleotide"
taggtattacgtgcacatatatat

SEQ ID NO: 1266 - DNA, 24 bp, Artificial Sequence
  source: /note="Description of Artificial Sequence: Synthetic oligonucleotide"
aggtattacgtgcacatatatata

SEQ ID NO: 1267 - DNA, 24 bp, Artificial Sequence
  source: /note="Description of Artificial Sequence: Synthetic oligonucleotide"
ggtattacgtgcacatatatatat

SEQ ID NO: 1268 - DNA, 24 bp, Artificial Sequence
  source: /note="Description of Artificial Sequence: Synthetic oligonucleotide"
agcaacaactataatattgtgcag

SEQ ID NO: 1269 - DNA, 24 bp, Artificial Sequence
  source: /note="Description of Artificial Sequence: Synthetic oligonucleotide"
gttcctccatctttctctttttat

SEQ ID NO: 1270 - DNA, 24 bp, Artificial Sequence
  source: /note="Description of Artificial Sequence: Synthetic oligonucleotide"
tctttttatggagttcactaggtg

SEQ ID NO: 1271 - DNA, 24 bp, Artificial Sequence
  source: /note="Description of Artificial Sequence: Synthetic oligonucleotide"
tatggagttcactaggtgcaccat

SEQ ID NO: 1272 - DNA, 24 bp, Artificial Sequence
  source: /note="Description of Artificial Sequence: Synthetic oligonucleotide"
atggagttcactaggtgcaccatt

SEQ ID NO: 1273 - DNA, 24 bp, Artificial Sequence
  source: /note="Description of Artificial Sequence: Synthetic oligonucleotide"
tggagttcactaggtgcaccattc

SEQ ID NO: 1274 - DNA, 24 bp, Artificial Sequence
  source: /note="Description of Artificial Sequence: Synthetic oligonucleotide"
ataattgcatctgaacatttggtc

SEQ ID NO: 1275 - DNA, 24 bp, Artificial Sequence
  source: /note="Description of Artificial Sequence: Synthetic oligonucleotide"
gtcctttgcagggtgagtgagcga

SEQ ID NO: 1276 - DNA, 24 bp, Artificial Sequence
  source: /note="Description of Artificial Sequence: Synthetic oligonucleotide"
ttccaaagcagcctctcgctcact

SEQ ID NO: 1277 - DNA, 24 bp, Artificial Sequence
  source: /note="Description of Artificial Sequence: Synthetic oligonucleotide"
cagggtgagtgagcgagaggctgc

SEQ ID NO: 1278 - DNA, 24 bp, Artificial Sequence
  source: /note="Description of Artificial Sequence: Synthetic oligonucleotide"
gaagaaactcatagattactgcaa

SEQ ID NO: 1279 - DNA, 24 bp, Artificial Sequence
  source: /note="Description of Artificial Sequence: Synthetic oligonucleotide"
caggtccagggggaactgttgcag

SEQ ID NO: 1280 - DNA, 24 bp, Artificial Sequence
  source: /note="Description of Artificial Sequence: Synthetic oligonucleotide"
ccaggtccagggggaactgttgca

SEQ ID NO: 1281 - DNA, 24 bp, Artificial Sequence
  source: /note="Description of Artificial Sequence: Synthetic oligonucleotide"
agcttctgtaagccaggcaagaaa

SEQ ID NO: 1282 - DNA, 24 bp, Artificial Sequence
  source: /note="Description of Artificial Sequence: Synthetic oligonucleotide"
ttgcctggcttacagaagctgaaa

SEQ ID NO: 1283 - DNA, 24 bp, Artificial Sequence
  source: /note="Description of Artificial Sequence: Synthetic oligonucleotide"
cttacgggtagcatcctgtaggac

SEQ ID NO: 1284 - DNA, 24 bp, Artificial Sequence
  source: /note="Description of Artificial Sequence: Synthetic oligonucleotide"
ctcccttggagtcttctaggagcc

SEQ ID NO: 1285 - DNA, 24 bp, Artificial Sequence
  source: /note="Description of Artificial Sequence: Synthetic oligonucleotide"
actcccttggagtcttctaggagc

SEQ ID NO: 1286 - DNA, 24 bp, Artificial Sequence
  source: /note="Description of Artificial Sequence: Synthetic oligonucleotide"
atcagctcttttactcccttggag

SEQ ID NO: 1287 - DNA, 24 bp, Artificial Sequence
  source: /note="Description of Artificial Sequence: Synthetic oligonucleotide"
cgctttagcactcttgtggatcca

SEQ ID NO: 1288 - DNA, 24 bp, Artificial Sequence
  source: /note="Description of Artificial Sequence: Synthetic oligonucleotide"
gcactcttgtggatccaattgaac

SEQ ID NO: 1289 - DNA, 24 bp, Artificial Sequence
  source: /note="Description of Artificial Sequence: Synthetic oligonucleotide"
tccctggcttgtcagttacaagta

SEQ ID NO: 1290 - DNA, 24 bp, Artificial Sequence
  source: /note="Description of Artificial Sequence: Synthetic oligonucleotide"
gtccctggcttgtcagttacaagt

SEQ ID NO: 1291 - DNA, 24 bp, Artificial Sequence
  source: /note="Description of Artificial Sequence: Synthetic oligonucleotide"
ttttgtccctggcttgtcagttac

SEQ ID NO: 1292 - DNA, 24 bp, Artificial Sequence
  source: /note="Description of Artificial Sequence: Synthetic oligonucleotide"
gttttgtccctggcttgtcagtta

SEQ ID NO: 1293 - DNA, 24 bp, Artificial Sequence
  source: /note="Description of Artificial Sequence: Synthetic oligonucleotide"
tacttgtaactgacaagccaggga

SEQ ID NO: 1294 - DNA, 24 bp, Artificial Sequence
  source: /note="Description of Artificial Sequence: Synthetic oligonucleotide"
gctcctactcagactgttactctg

SEQ ID NO: 1295 - DNA, 24 bp, Artificial Sequence
  source: /note="Description of Artificial Sequence: Synthetic oligonucleotide"
taccatgtattgctaaacaaagta

SEQ ID NO: 1296 - DNA, 24 bp, Artificial Sequence
  source: /note="Description of Artificial Sequence: Synthetic oligonucleotide"
attgaagagtaacaatttgagcca

SEQ ID NO: 1297 - DNA, 24 bp, Artificial Sequence
  source: /note="Description of Artificial Sequence: Synthetic oligonucleotide"
aggctctgcaaagttctttgaaag

SEQ ID NO: 1298 - DNA, 24 bp, Artificial Sequence
  source: /note="Description of Artificial Sequence: Synthetic oligonucleotide"
aaagagcaacaaaatggcttcaac

SEQ ID NO: 1299 - DNA, 24 bp, Artificial Sequence
  source: /note="Description of Artificial Sequence: Synthetic oligonucleotide"
aaagagcaataaaatggcttcaac

SEQ ID NO: 1300 - DNA, 24 bp, Artificial Sequence
  source: /note="Description of Artificial Sequence: Synthetic oligonucleotide"
aaagaactttgcagagcctcaaaa

SEQ ID NO: 1301 - DNA, 24 bp, Artificial Sequence
  source: /note="Description of Artificial Sequence: Synthetic oligonucleotide"
ctgaatatctatgcattaataact

SEQ ID NO: 1302 - DNA, 24 bp, Artificial Sequence
  source: /note="Description of Artificial Sequence: Synthetic oligonucleotide"
tattatattacagggcatattata

SEQ ID NO: 1303 - DNA, 24 bp, Artificial Sequence
  source: /note="Description of Artificial Sequence: Synthetic oligonucleotide"
aggtaagccgaggtttggccttta

SEQ ID NO: 1304 - DNA, 24 bp, Artificial Sequence
  source: /note="Description of Artificial Sequence: Synthetic oligonucleotide"
cccagagtccttcaaagatattga

SEQ ID NO: 1305 - RNA, 24 nt, Artificial Sequence
  source: /note="Description of Artificial Sequence: Synthetic oligonucleotide"
ucuuuuucuucuuuuuuccuuuuu

SEQ ID NO: 1306 - RNA, 24 nt, Artificial Sequence
  source: /note="Description of Artificial Sequence: Synthetic oligonucleotide"
cuuuuucuucuuuuuuccuuuuug

SEQ ID NO: 1307 - RNA, 24 nt, Artificial Sequence
  source: /note="Description of Artificial Sequence: Synthetic oligonucleotide"
uuuuucuucuuuuuuccuuuuugc

SEQ ID NO: 1308 - RNA, 24 nt, Artificial Sequence
  source: /note="Description of Artificial Sequence: Synthetic oligonucleotide"
ucuucuuuuuuccuuuuugcaaaa

SEQ ID NO: 1309 - RNA, 24 nt, Artificial Sequence
  source: /note="Description of Artificial Sequence: Synthetic oligonucleotide"
cuucuuuuuuccuuuuugcaaaaa

SEQ ID NO: 1310 - RNA, 24 nt, Artificial Sequence
  source: /note="Description of Artificial Sequence: Synthetic oligonucleotide"
uucuuuuuuccuuuuugcaaaaac

SEQ ID NO: 1311 - RNA, 24 nt, Artificial Sequence
  source: /note="Description of Artificial Sequence: Synthetic oligonucleotide"
uuccuuuuugcaaaaacccaaaau

SEQ ID NO: 1312 - RNA, 24 nt, Artificial Sequence
  source: /note="Description of Artificial Sequence: Synthetic oligonucleotide"
uccuuuuugcaaaaacccaaaaua

SEQ ID NO: 1313 - RNA, 24 nt, Artificial Sequence
  source: /note="Description of Artificial Sequence: Synthetic oligonucleotide"
ccuuuuugcaaaaacccaaaauau

SEQ ID NO: 1314 - RNA, 24 nt, Artificial Sequence
  source: /note="Description of Artificial Sequence: Synthetic oligonucleotide"
cuuuuugcaaaaacccaaaauauu

SEQ ID NO: 1315 - RNA, 24 nt, Artificial Sequence
  source: /note="Description of Artificial Sequence: Synthetic oligonucleotide"
ugcaaaaacccaaaauauuuuagc

SEQ ID NO: 1316 - RNA, 24 nt, Artificial Sequence
  source: /note="Description of Artificial Sequence: Synthetic oligonucleotide"
gcaaaaacccaaaauauuuuagcu

SEQ ID NO: 1317 - RNA, 24 nt, Artificial Sequence
  source: /note="Description of Artificial Sequence: Synthetic oligonucleotide"
caaaaacccaaaauauuuuagcuc

SEQ ID NO: 1318 - RNA, 24 nt, Artificial Sequence
  source: /note="Description of Artificial Sequence: Synthetic oligonucleotide"
agcuccuacucagacuguuacucu

SEQ ID NO: 1319 - RNA, 24 nt, Artificial Sequence
  source: /note="Description of Artificial Sequence: Synthetic oligonucleotide"
gcuccuacucagacuguuacucug

SEQ ID NO: 1320 - RNA, 24 nt, Artificial Sequence
  source: /note="Description of Artificial Sequence: Synthetic oligonucleotide"
cuuaguaaccacagguugugucac

SEQ ID NO: 1321 - RNA, 24 nt, Artificial Sequence
  source: /note="Description of Artificial Sequence: Synthetic oligonucleotide"
gagauggcaguuuccuuaguaacc

SEQ ID NO: 1322 - RNA, 24 nt, Artificial Sequence
  source: /note="Description of Artificial Sequence: Synthetic oligonucleotide"
uaguuuggagauggcaguuuccuu

SEQ ID NO: 1323 - RNA, 24 nt, Artificial Sequence
  source: /note="Description of Artificial Sequence: Synthetic oligonucleotide"
uucucauaccuucugcuugaugau

SEQ ID NO: 1324 - RNA, 24 nt, Artificial Sequence
  source: /note="Description of Artificial Sequence: Synthetic oligonucleotide"
ucauuuuuucucauaccuucugcu

SEQ ID NO: 1325 - RNA, 24 nt, Artificial Sequence
  source: /note="Description of Artificial Sequence: Synthetic oligonucleotide"
aucauuuuuucucauaccuucugc

SEQ ID NO: 1326 - RNA, 24 nt, Artificial Sequence
  source: /note="Description of Artificial Sequence: Synthetic oligonucleotide"
aagaaaaacuucugccaacuuuua

SEQ ID NO: 1327 - RNA, 24 nt, Artificial Sequence
  source: /note="Description of Artificial Sequence: Synthetic oligonucleotide"
aaagaaaaacuucugccaacuuuu

SEQ ID NO: 1328 - RNA, 24 nt, Artificial Sequence
  source: /note="Description of Artificial Sequence: Synthetic oligonucleotide"
ucuuuaaaaugaagauuuuccacc

SEQ ID NO: 1329 - RNA, 24 nt, Artificial Sequence
  source: /note="Description of Artificial Sequence: Synthetic oligonucleotide"
cuuuaaaaugaagauuuuccacca

SEQ ID NO: 1330 - RNA, 24 nt, Artificial Sequence
  source: /note="Description of Artificial Sequence: Synthetic oligonucleotide"
uuuaaaaugaagauuuuccaccaa

SEQ ID NO: 1331 - RNA, 24 nt, Artificial Sequence
  source: /note="Description of Artificial Sequence: Synthetic oligonucleotide"
aaaugaagauuuuccaccaaucac

SEQ ID NO: 1332 - RNA, 24 nt, Artificial Sequence
  source: /note="Description of Artificial Sequence: Synthetic oligonucleotide"
ccaccaaucacuuuacucuccuag

SEQ ID NO: 1333 - RNA, 24 nt, Artificial Sequence
  source: /note="Description of Artificial Sequence: Synthetic oligonucleotide"
caccaaucacuuuacucuccuaga

SEQ ID NO: 1334 - RNA, 24 nt, Artificial Sequence
  source: /note="Description of Artificial Sequence: Synthetic oligonucleotide"
cucuccuagaccauuucccaccag

SEQ ID NO: 1335 - RNA, 24 nt, Artificial Sequence
  source: /note="Description of Artificial Sequence: Synthetic oligonucleotide"
agaaaagauuaaacagugugcuac

SEQ ID NO: 1336 - RNA, 24 nt, Artificial Sequence
  source: /note="Description of Artificial Sequence: Synthetic oligonucleotide"
uuugagaaaagauuaaacagugug

SEQ ID NO: 1337 - RNA, 24 nt, Artificial Sequence
  source: /note="Description of Artificial Sequence: Synthetic oligonucleotide"
auuugagaaaagauuaaacagugu

SEQ ID NO: 1338 - RNA, 24 nt, Artificial Sequence
  source: /note="Description of Artificial Sequence: Synthetic oligonucleotide"
uauuugagaaaagauuaaacagug

SEQ ID NO: 1339 - RNA, 24 nt, Artificial Sequence
  source: /note="Description of Artificial Sequence: Synthetic oligonucleotide"
aucuuuucucaaauaaaaagacau

SEQ ID NO: 1340 - RNA, 24 nt, Artificial Sequence
  source: /note="Description of Artificial Sequence: Synthetic oligonucleotide"
cucaaauaaaaagacauggggcuu

SEQ ID NO: 1341 - RNA, 24 nt, Artificial Sequence
  source: /note="Description of Artificial Sequence: Synthetic oligonucleotide"
ucaaauaaaaagacauggggcuuc

SEQ ID NO: 1342 - RNA, 24 nt, Artificial Sequence
  source: /note="Description of Artificial Sequence: Synthetic oligonucleotide"
uguuuugccuuuuugguaucuuac

SEQ ID NO: 1343 - RNA, 24 nt, Artificial Sequence
  source: /note="Description of Artificial Sequence: Synthetic oligonucleotide"
guuuugccuuuuugguaucuuaca

SEQ ID NO: 1344 - RNA, 24 nt, Artificial Sequence
  source: /note="Description of Artificial Sequence: Synthetic oligonucleotide"
uuuugccuuuuugguaucuuacag

SEQ ID NO: 1345 - RNA, 24 nt, Artificial Sequence
  source: /note="Description of Artificial Sequence: Synthetic oligonucleotide"
gccuuuuugguaucuuacaggaac

SEQ ID NO: 1346 - RNA, 24 nt, Artificial Sequence
  source: /note="Description of Artificial Sequence: Synthetic oligonucleotide"
ccuuuuugguaucuuacaggaacu

SEQ ID NO: 1347 - RNA, 24 nt, Artificial Sequence
  source: /note="Description of Artificial Sequence: Synthetic oligonucleotide"
ugguaucuuacaggaacuccagga

SEQ ID NO: 1348 - RNA, 24 nt, Artificial Sequence
  source: /note="Description of Artificial Sequence: Synthetic oligonucleotide"
gguaucuuacaggaacuccaggau

SEQ ID NO: 1349 - RNA, 24 nt, Artificial Sequence
  source: /note="Description of Artificial Sequence: Synthetic oligonucleotide"
aggauugcugaauuauuucuuccc

SEQ ID NO: 1350 - RNA, 24 nt, Artificial Sequence
  source: /note="Description of Artificial Sequence: Synthetic oligonucleotide"
gaggauugcugaauuauuucuucc

SEQ ID NO: 1351 - RNA, 24 nt, Artificial Sequence
  source: /note="Description of Artificial Sequence: Synthetic oligonucleotide"
ugaggauugcugaauuauuucuuc

SEQ ID NO: 1352 - RNA, 24 nt, Artificial Sequence
  source: /note="Description of Artificial Sequence: Synthetic oligonucleotide"
cuguagaauacuggcaucuguuuu

SEQ ID NO: 1353 - RNA, 24 nt, Artificial Sequence
  source: /note="Description of Artificial Sequence: Synthetic oligonucleotide"
ccuguagaauacuggcaucuguuu

SEQ ID NO: 1354 - RNA, 24 nt, Artificial Sequence
  source: /note="Description of Artificial Sequence: Synthetic oligonucleotide"
uccuguagaauacuggcaucuguu

SEQ ID NO: 1355 - RNA, 24 nt, Artificial Sequence
  source: /note="Description of Artificial Sequence: Synthetic oligonucleotide"
cagaccuccugccaccgcagauuc

SEQ ID NO: 1356 - RNA, 24 nt, Artificial Sequence
  source: /note="Description of Artificial Sequence: Synthetic oligonucleotide"
ugucugacagcuguuugcagaccu

SEQ ID NO: 1357 - RNA, 24 nt, Artificial Sequence
  source: /note="Description of Artificial Sequence: Synthetic oligonucleotide"
cugucugacagcuguuugcagacc

SEQ ID NO: 1358 - RNA, 24 nt, Artificial Sequence
  source: /note="Description of Artificial Sequence: Synthetic oligonucleotide"
ucugucugacagcuguuugcagac

SEQ ID NO: 1359 - RNA, 24 nt, Artificial Sequence
  source: /note="Description of Artificial Sequence: Synthetic oligonucleotide"
uucugucugacagcuguuugcaga

SEQ ID NO: 1360 - RNA, 24 nt, Artificial Sequence
  source: /note="Description of Artificial Sequence: Synthetic oligonucleotide"
auuccuauuagaucugucgcccua

SEQ ID NO: 1361 - RNA, 24 nt, Artificial Sequence
  source: /note="Description of Artificial Sequence: Synthetic oligonucleotide"
cauuccuauuagaucugucgcccu

SEQ ID NO: 1362 - RNA, 24 nt, Artificial Sequence
  source: /note="Description of Artificial Sequence: Synthetic oligonucleotide"
agcagacuuuuuaagcuuucuuua

SEQ ID NO: 1363 - RNA, 24 nt, Artificial Sequence
  source: /note="Description of Artificial Sequence: Synthetic oligonucleotide"
gcagacuuuuuaagcuuucuuuag

SEQ ID NO: 1364 - RNA, 24 nt, Artificial Sequence
  source: /note="Description of Artificial Sequence: Synthetic oligonucleotide"
uaagcuuucuuuagaagaauauuu

SEQ ID NO: 1365 - RNA, 24 nt, Artificial Sequence
  source: /note="Description of Artificial Sequence: Synthetic oligonucleotide"
aagcuuucuuuagaagaauauuuc

SEQ ID NO: 1366 - RNA, 24 nt, Artificial Sequence
  source: /note="Description of Artificial Sequence: Synthetic oligonucleotide"
agcuuucuuuagaagaauauuuca

SEQ ID NO: 1367 - RNA, 24 nt, Artificial Sequence
  source: /note="Description of Artificial Sequence: Synthetic oligonucleotide"
uuuagaagaauauuucaugagaga

SEQ ID NO: 1368 - RNA, 24 nt, Artificial Sequence
  source: /note="Description of Artificial Sequence: Synthetic oligonucleotide"
gaagaauauuucaugagagauuau

SEQ ID NO: 1369 - RNA, 24 nt, Artificial Sequence
  source: /note="Description of Artificial Sequence: Synthetic oligonucleotide"
ucaguauaaccaaaaaauauacgc

SEQ ID NO: 1370 - RNA, 24 nt, Artificial Sequence
  source: /note="Description of Artificial Sequence: Synthetic oligonucleotide"
acauaauccaucuauuuuucuuga

SEQ ID NO: 1371 - RNA, 24 nt, Artificial Sequence
  source: /note="Description of Artificial Sequence: Synthetic oligonucleotide"
cauaauccaucuauuuuucuugau

SEQ ID NO: 1372 - RNA, 24 nt, Artificial Sequence
  source: /note="Description of Artificial Sequence: Synthetic oligonucleotide"
ucuugauccauaugcuuuuaccug

SEQ ID NO: 1373 - RNA, 24 nt, Artificial Sequence
  source: /note="Description of Artificial Sequence: Synthetic oligonucleotide"
cuugauccauaugcuuuuaccugc

SEQ ID NO: 1374 - RNA, 24 nt, Artificial Sequence
  source: /note="Description of Artificial Sequence: Synthetic oligonucleotide"
uugauccauaugcuuuuaccugca

SEQ ID NO: 1375 - RNA, 24 nt, Artificial Sequence
  source: /note="Description of Artificial Sequence: Synthetic oligonucleotide"
ucaacagaucugucaaaucgccug

SEQ ID NO: 1376 - RNA, 24 nt, Artificial Sequence
  source: /note="Description of Artificial Sequence: Synthetic oligonucleotide"
accugcaggcgauuugacagaucu

SEQ ID NO: 1377 - RNA, 24 nt, Artificial Sequence
  source: /note="Description of Artificial Sequence: Synthetic oligonucleotide"
ccugcaggcgauuugacagaucug

SEQ ID NO: 1378 - RNA, 24 nt, Artificial Sequence
  source: /note="Description of Artificial Sequence: Synthetic oligonucleotide"
acagaucuguugagaaauggcggc

SEQ ID NO: 1379 - RNA, 24 nt, Artificial Sequence
  source: /note="Description of Artificial Sequence: Synthetic oligonucleotide"
uaucauaaugaaaacgccgccauu

SEQ ID NO: 1380 - RNA, 24 nt, Artificial Sequence
  source: /note="Description of Artificial Sequence: Synthetic oligonucleotide"
cauuaugauauaaagauauuuaau

SEQ ID NO: 1381 - RNA, 24 nt, Artificial Sequence
  source: /note="Description of Artificial Sequence: Synthetic oligonucleotide"
uauuuagcauguucccaauucuca

SEQ ID NO: 1382 - RNA, 24 nt, Artificial Sequence
  source: /note="Description of Artificial Sequence: Synthetic oligonucleotide"
gaaaaaacaaaucaaagacuuacc

SEQ ID NO: 1383 - RNA, 24 nt, Artificial Sequence
  source: /note="Description of Artificial Sequence: Synthetic oligonucleotide"
auuuguuuuuucgaaauuguauuu

SEQ ID NO: 1384 - RNA, 24 nt, Artificial Sequence
  source: /note="Description of Artificial Sequence: Synthetic oligonucleotide"
uuuuuucgaaauuguauuuaucuu

SEQ ID NO: 1385 - RNA, 24 nt, Artificial Sequence
  source: /note="Description of Artificial Sequence: Synthetic oligonucleotide"
uucgaaauuguauuuaucuucagc

SEQ ID NO: 1386 - RNA, 24 nt, Artificial Sequence
  source: /note="Description of Artificial Sequence: Synthetic oligonucleotide"
ucgaaauuguauuuaucuucagca

SEQ ID NO: 1387 - RNA, 24 nt, Artificial Sequence
  source: /note="Description of Artificial Sequence: Synthetic oligonucleotide"
cgaaauuguauuuaucuucagcac

SEQ ID NO: 1388 - RNA, 24 nt, Artificial Sequence
  source: /note="Description of Artificial Sequence: Synthetic oligonucleotide"
gaaauuguauuuaucuucagcaca

SEQ ID NO: 1389 - RNA, 24 nt, Artificial Sequence
  source: /note="Description of Artificial Sequence: Synthetic oligonucleotide"
agaaguuaaagaguccagaugugc

SEQ ID NO: 1390 - RNA, 24 nt, Artificial Sequence
  source: /note="Description of Artificial Sequence: Synthetic oligonucleotide"
ucuucagcacaucuggacucuuua

SEQ ID NO: 1391 - RNA, 24 nt, Artificial Sequence
  source: /note="Description of Artificial Sequence: Synthetic oligonucleotide"
caucacccuucagaaccugaucuu

SEQ ID NO: 1392 - RNA, 24 nt, Artificial Sequence
  source: /note="Description of Artificial Sequence: Synthetic oligonucleotide"
acuucuuaaagaucagguucugaa

SEQ ID NO: 1393 - RNA, 24 nt, Artificial Sequence
  source: /note="Description of Artificial Sequence: Synthetic oligonucleotide"
gacuguuguugucaucauuauauu

SEQ ID NO: 1394 - RNA, 24 nt, Artificial Sequence
  source: /note="Description of Artificial Sequence: Synthetic oligonucleotide"
acuguuguugucaucauuauauua

SEQ ID NO: 1395 - RNA, 24 nt, Artificial Sequence
  source: /note="Description of Artificial Sequence: Synthetic oligonucleotide"
aacuagaauaaaaggaaaaauaaa

SEQ ID NO: 1396 - RNA, 24 nt, Artificial Sequence
  source: /note="Description of Artificial Sequence: Synthetic oligonucleotide"
cuacuauauauuuauuuuuccuuu

SEQ ID NO: 1397 - RNA, 24 nt, Artificial Sequence
  source: /note="Description of Artificial Sequence: Synthetic oligonucleotide"
uuuuuccuuuuauucuaguugaaa

SEQ ID NO: 1398 - RNA, 24 nt, Artificial Sequence
  source: /note="Description of Artificial Sequence: Synthetic oligonucleotide"
uccuuuuauucuaguugaaagaau

SEQ ID NO: 1399 - RNA, 24 nt, Artificial Sequence
  source: /note="Description of Artificial Sequence: Synthetic oligonucleotide"
ccuuuuauucuaguugaaagaauu

SEQ ID NO: 1400 - RNA, 24 nt, Artificial Sequence
  source: /note="Description of Artificial Sequence: Synthetic oligonucleotide"
cuuuuauucuaguugaaagaauuc

SEQ ID NO: 1401 - RNA, 24 nt, Artificial Sequence
  source: /note="Description of Artificial Sequence: Synthetic oligonucleotide"
auucuaguugaaagaauucagaau

SEQ ID NO: 1402 - RNA, 24 nt, Artificial Sequence
  source: /note="Description of Artificial Sequence: Synthetic oligonucleotide"
uucuaguugaaagaauucagaauc

SEQ ID NO: 1403 - RNA, 24 nt, Artificial Sequence
  source: /note="Description of Artificial Sequence: Synthetic oligonucleotide"
auucaacuguugccuccgguucug

SEQ ID NO: 1404 - RNA, 24 nt, Artificial Sequence
  source: /note="Description of Artificial Sequence: Synthetic oligonucleotide"
acauuucauucaacuguugccucc

SEQ ID NO: 1405 - RNA, 24 nt, Artificial Sequence
  source: /note="Description of Artificial Sequence: Synthetic oligonucleotide"
cuuuuggauugcaucuacuguaua

SEQ ID NO: 1406 - RNA, 24 nt, Artificial Sequence
  source: /note="Description of Artificial Sequence: Synthetic oligonucleotide"
ugugauuuucuuuuggauugcauc

SEQ ID NO: 1407 - RNA, 24 nt, Artificial Sequence
  source: /note="Description of Artificial Sequence: Synthetic oligonucleotide"
auacuaaccuugguuucugugauu

SEQ ID NO: 1408 - RNA, 24 nt, Artificial Sequence
  source: /note="Description of Artificial Sequence: Synthetic oligonucleotide"
aaaagguaucuuugauacuaaccu

SEQ ID NO: 1409 - RNA, 24 nt, Artificial Sequence
  source: /note="Description of Artificial Sequence: Synthetic oligonucleotide"
aaaaagguaucuuugauacuaacc

SEQ ID NO: 1410 - RNA, 24 nt, Artificial Sequence
  source: /note="Description of Artificial Sequence: Synthetic oligonucleotide"
uuuuaaaaagguaucuuugauacu

SEQ ID NO: 1411 - RNA, 24 nt, Artificial Sequence
  source: /note="Description of Artificial Sequence: Synthetic oligonucleotide"
auuuuaaaaagguaucuuugauac

SEQ ID NO: 1412 - RNA, 24 nt, Artificial Sequence
  source: /note="Description of Artificial Sequence: Synthetic oligonucleotide"
uuaaugcaaacugggacacaaaca

SEQ ID NO: 1413 - RNA, 24 nt, Artificial Sequence
  source: /note="Description of Artificial Sequence: Synthetic oligonucleotide"
uaaauugccauguuugugucccag

SEQ ID NO: 1414 - RNA, 24 nt, Artificial Sequence
  source: /note="Description of Artificial Sequence: Synthetic oligonucleotide"
aaauugccauguuugugucccagu

SEQ ID NO: 1415 - RNA, 24 nt, Artificial Sequence
  source: /note="Description of Artificial Sequence: Synthetic oligonucleotide"
aauugccauguuugugucccaguu

SEQ ID NO: 1416 - RNA, 24 nt, Artificial Sequence
  source: /note="Description of Artificial Sequence: Synthetic oligonucleotide"
ugucccaguuugcauuaacaaaua

SEQ ID NO: 1417 - RNA, 24 nt, Artificial Sequence
  source: /note="Description of Artificial Sequence: Synthetic oligonucleotide"
caacauaguucucaaacuauuugu

SEQ ID NO: 1418 - RNA, 24 nt, Artificial Sequence
  source: /note="Description of Artificial Sequence: Synthetic oligonucleotide"
ccaacauaguucucaaacuauuug

SEQ ID NO: 1419 - RNA, 24 nt, Artificial Sequence
  source: /note="Description of Artificial Sequence: Synthetic oligonucleotide"
uccaacauaguucucaaacuauuu

SEQ ID NO: 1420 - RNA, 24 nt, Artificial Sequence
  source: /note="Description of Artificial Sequence: Synthetic oligonucleotide"
uuuccaacauaguucucaaacuau

SEQ ID NO: 1421 - RNA, 24 nt, Artificial Sequence
  source: /note="Description of Artificial Sequence: Synthetic oligonucleotide"
uuuuccaacauaguucucaaacua

SEQ ID NO: 1422 - RNA, 24 nt, Artificial Sequence
  source: /note="Description of Artificial Sequence: Synthetic oligonucleotide"
uuuuuccaacauaguucucaaacu

SEQ ID NO: 1423 - RNA, 24 nt, Artificial Sequence
  source: /note="Description of Artificial Sequence: Synthetic oligonucleotide"
cauuaacaaauaguuugagaacua

SEQ ID NO: 1424 - RNA, 24 nt, Artificial Sequence
  source: /note="Description of Artificial Sequence: Synthetic oligonucleotide"
agaacuauguuggaaaaaaaaaua

SEQ ID NO: 1425 - RNA, 24 nt, Artificial Sequence
  source: /note="Description of Artificial Sequence: Synthetic oligonucleotide"
guucuucuagccuggagaaagaag

SEQ ID NO: 1426 - RNA, 24 nt, Artificial Sequence
  source: /note="Description of Artificial Sequence: Synthetic oligonucleotide"
auucuucuuucuccaggcuagaag

SEQ ID NO: 1427 - RNA, 24 nt, Artificial Sequence
  source: /note="Description of Artificial Sequence: Synthetic oligonucleotide"
uucuucuuucuccaggcuagaaga

SEQ ID NO: 1428 - RNA, 24 nt, Artificial Sequence
  source: /note="Description of Artificial Sequence: Synthetic oligonucleotide"
uccaggcuagaagaacaaaagaau

SEQ ID NO: 1429 - RNA, 24 nt, Artificial Sequence
  source: /note="Description of Artificial Sequence: Synthetic oligonucleotide"
aaauucugacaagauauucuuuug

SEQ ID NO: 1430 - RNA, 24 nt, Artificial Sequence
  source: /note="Description of Artificial Sequence: Synthetic oligonucleotide"
cuuuuaguugcugcucuuuuccag

SEQ ID NO: 1431 - RNA, 24 nt, Artificial Sequence
  source: /note="Description of Artificial Sequence: Synthetic oligonucleotide"
agaaaauaaaauuaccuugacuug

SEQ ID NO: 1432 - RNA, 24 nt, Artificial Sequence
  source: /note="Description of Artificial Sequence: Synthetic oligonucleotide"
ugcaagcaggcccugggggauuug

SEQ ID NO: 1433 - RNA, 24 nt, Artificial Sequence
  source: /note="Description of Artificial Sequence: Synthetic oligonucleotide"
auuuucucaaaucccccagggccu

SEQ ID NO: 1434 - RNA, 24 nt, Artificial Sequence
  source: /note="Description of Artificial Sequence: Synthetic oligonucleotide"
uuuucucaaaucccccagggccug

SEQ ID NO: 1435 - RNA, 24 nt, Artificial Sequence
  source: /note="Description of Artificial Sequence: Synthetic oligonucleotide"
cucaaaucccccagggccugcuug

SEQ ID NO: 1436 - RNA, 24 nt, Artificial Sequence
  source: /note="Description of Artificial Sequence: Synthetic oligonucleotide"
ucaaaucccccagggccugcuugc

SEQ ID NO: 1437 - RNA, 24 nt, Artificial Sequence
  source: /note="Description of Artificial Sequence: Synthetic oligonucleotide"
uuaauucaaucauugguuuucugc

SEQ ID NO: 1438 - RNA, 24 nt, Artificial Sequence
  source: /note="Description of Artificial Sequence: Synthetic oligonucleotide"
uaauucaaucauugguuuucugcc

SEQ ID NO: 1439 - RNA, 24 nt, Artificial Sequence
  source: /note="Description of Artificial Sequence: Synthetic oligonucleotide"
aauucaaucauugguuuucugccc

SEQ ID NO: 1440 - RNA, 24 nt, Artificial Sequence
  source: /note="Description of Artificial Sequence: Synthetic oligonucleotide"
auucaaucauugguuuucugccca

SEQ ID NO: 1441 - RNA, 24 nt, Artificial Sequence
  source: /note="Description of Artificial Sequence: Synthetic oligonucleotide"
gcaaggaacuaugaauaaccuaau

SEQ ID NO: 1442 - RNA, 24 nt, Artificial Sequence
  source: /note="Description of Artificial Sequence: Synthetic oligonucleotide"
cugcccauuagguuauucauaguu

SEQ ID NO: 1443 - RNA, 24 nt, Artificial Sequence
  source: /note="Description of Artificial Sequence: Synthetic oligonucleotide"
ugcccauuagguuauucauaguuc

SEQ ID NO: 1444 - RNA, 24 nt, Artificial Sequence
  source: /note="Description of Artificial Sequence: Synthetic oligonucleotide"
uagaaaacaauuuaacaggaaaua

SEQ ID NO: 1445 - RNA, 24 nt, Artificial Sequence
  source: /note="Description of Artificial Sequence: Synthetic oligonucleotide"
cuguuaaauuguuuucuauaaacc

SEQ ID NO: 1446 - RNA, 24 nt, Artificial Sequence
  source: /note="Description of Artificial Sequence: Synthetic oligonucleotide"
gaaauaaaaaagauguuacuguau

SEQ ID NO: 1447 - RNA, 24 nt, Artificial Sequence
  source: /note="Description of Artificial Sequence: Synthetic oligonucleotide"
agaaauaaaaaagauguuacugua

SEQ ID NO: 1448 - RNA, 24 nt, Artificial Sequence
  source: /note="Description of Artificial Sequence: Synthetic oligonucleotide"
cuauaaacccuuauacaguaacau

SEQ ID NO: 1449 - RNA, 24 nt, Artificial Sequence
  source: /note="Description of Artificial Sequence: Synthetic oligonucleotide"
uauaaacccuuauacaguaacauc

SEQ ID NO: 1450 - RNA, 24 nt, Artificial Sequence
  source: /note="Description of Artificial Sequence: Synthetic oligonucleotide"
uuauuucuaaaaguguuuuggcug

SEQ ID NO: 1451 - RNA, 24 nt, Artificial Sequence
  source: /note="Description of Artificial Sequence: Synthetic oligonucleotide"
uauuucuaaaaguguuuuggcugg

SEQ ID NO: 1452 - RNA, 24 nt, Artificial Sequence
  source: /note="Description of Artificial Sequence: Synthetic oligonucleotide"
auuucuaaaaguguuuuggcuggu

SEQ ID NO: 1453 - RNA, 24 nt, Artificial Sequence
  source: /note="Description of Artificial Sequence: Synthetic oligonucleotide"
uuucuaaaaguguuuuggcugguc

SEQ ID NO: 1454 - RNA, 24 nt, Artificial Sequence
  source: /note="Description of Artificial Sequence: Synthetic oligonucleotide"
uaaaaguguuuuggcuggucucac

SEQ ID NO: 1455 - RNA, 24 nt, Artificial Sequence
  source: /note="Description of Artificial Sequence: Synthetic oligonucleotide"
cauaauacaaaguaaaguacaauu

SEQ ID NO: 1456 - RNA, 24 nt, Artificial Sequence
  source: /note="Description of Artificial Sequence: Synthetic oligonucleotide"
acauaauacaaaguaaaguacaau

SEQ ID NO: 1457 - RNA, 24 nt, Artificial Sequence
  source: /note="Description of Artificial Sequence: Synthetic oligonucleotide"
ggcuggucucacaauuguacuuua

SEQ ID NO: 1458 - RNA, 24 nt, Artificial Sequence
  source: /note="Description of Artificial Sequence: Synthetic oligonucleotide"
gcuggucucacaauuguacuuuac

SEQ ID NO: 1459 - RNA, 24 nt, Artificial Sequence
  source: /note="Description of Artificial Sequence: Synthetic oligonucleotide"
cuuuguauuauguaaaaggaauac

SEQ ID NO: 1460 - RNA, 24 nt, Artificial Sequence
  source: /note="Description of Artificial Sequence: Synthetic oligonucleotide"
uauuauguaaaaggaauacacaac

SEQ ID NO: 1461 - RNA, 24 nt, Artificial Sequence
  source: /note="Description of Artificial Sequence: Synthetic oligonucleotide"
uucuuacaggcaacaaugcaggau

SEQ ID NO: 1462 - RNA, 24 nt, Artificial Sequence
  source: /note="Description of Artificial Sequence: Synthetic oligonucleotide"
gaacagaggcguccccaguuggaa

SEQ ID NO: 1463 - RNA, 24 nt, Artificial Sequence
  source: /note="Description of Artificial Sequence: Synthetic oligonucleotide"
ggcagcgguaaugaguucuuccaa

SEQ ID NO: 1464 - RNA, 24 nt, Artificial Sequence
  source: /note="Description of Artificial Sequence: Synthetic oligonucleotide"
ucaaauuuugggcagcgguaauga

SEQ ID NO: 1465 - RNA, 24 nt, Artificial Sequence
  source: /note="Description of Artificial Sequence: Synthetic oligonucleotide"
aaaaacaagaccagcaaucaagag

SEQ ID NO: 1466 - RNA, 24 nt, Artificial Sequence
  source: /note="Description of Artificial Sequence: Synthetic oligonucleotide"
ugugucccaugcuuguuaaaaaac

SEQ ID NO: 1467 - RNA, 24 nt, Artificial Sequence
  source: /note="Description of Artificial Sequence: Synthetic oligonucleotide"
uuaacaagcaugggacacacaaag

SEQ ID NO: 1468 - RNA, 24 nt, Artificial Sequence
  source: /note="Description of Artificial Sequence: Synthetic oligonucleotide"
uaacaagcaugggacacacaaagc

SEQ ID NO: 1469 - RNA, 24 nt, Artificial Sequence
  source: /note="Description of Artificial Sequence: Synthetic oligonucleotide"
aacaagcaugggacacacaaagca

SEQ ID NO: 1470 - RNA, 24 nt, Artificial Sequence
  source: /note="Description of Artificial Sequence: Synthetic oligonucleotide"
acaagcaugggacacacaaagcaa

SEQ ID NO: 1471 - RNA, 24 nt, Artificial Sequence
  source: /note="Description of Artificial Sequence: Synthetic oligonucleotide"
uugaaacuugucaugcaucuugcu

SEQ ID NO: 1472 - RNA, 24 nt, Artificial Sequence
  source: /note="Description of Artificial Sequence: Synthetic oligonucleotide"
auugaaacuugucaugcaucuugc

SEQ ID NO: 1473 - RNA, 24 nt, Artificial Sequence
  source: /note="Description of Artificial Sequence: Synthetic oligonucleotide"
uauugaaacuugucaugcaucuug

SEQ ID NO: 1474 - RNA, 24 nt, Artificial Sequence
  source: /note="Description of Artificial Sequence: Synthetic oligonucleotide"
aauaaaaacuuaaguucauauauc

SEQ ID NO: 1475 - RNA, 24 nt, Artificial Sequence
  source: /note="Description of Artificial Sequence: Synthetic oligonucleotide"
gugaauauauuauuggauuucuau

SEQ ID NO: 1476 - RNA, 24 nt, Artificial Sequence
  source: /note="Description of Artificial Sequence: Synthetic oligonucleotide"
aagauaauucaugaacaucuuaau

SEQ ID NO: 1477 - RNA, 24 nt, Artificial Sequence
  source: /note="Description of Artificial Sequence: Synthetic oligonucleotide"
acagaaaagcauacacauuacuua

SEQ ID NO: 1478 - RNA, 24 nt, Artificial Sequence
  source: /note="Description of Artificial Sequence: Synthetic oligonucleotide"
cuguuaaagaggaaguuagaagau

SEQ ID NO: 1479 - RNA, 24 nt, Artificial Sequence
  source: /note="Description of Artificial Sequence: Synthetic oligonucleotide"
uguuaaagaggaaguuagaagauc

SEQ ID NO: 1480 - RNA, 24 nt, Artificial Sequence
  source: /note="Description of Artificial Sequence: Synthetic oligonucleotide"
ccgccuuccacucagagcucagau

SEQ ID NO: 1481 - RNA, 24 nt, Artificial Sequence
  source: /note="Description of Artificial Sequence: Synthetic oligonucleotide"
cccucagcucuugaaguaaacggu

SEQ ID NO: 1482 - RNA, 24 nt, Artificial Sequence
  source: /note="Description of Artificial Sequence: Synthetic oligonucleotide"
cuucaagagcugagggcaaagcag

SEQ ID NO: 1483 - RNA, 24 nt, Artificial Sequence
  source: /note="Description of Artificial Sequence: Synthetic oligonucleotide"
aacaaauagcuagagccaaagaga

SEQ ID NO: 1484 - RNA, 24 nt, Artificial Sequence
  source: /note="Description of Artificial Sequence: Synthetic oligonucleotide"
gaacaaauagcuagagccaaagag

SEQ ID NO: 1485 - RNA, 24 nt, Artificial Sequence
  source: /note="Description of Artificial Sequence: Synthetic oligonucleotide"
gcucuagcuauuuguucaaaagug

SEQ ID NO: 1486 - RNA, 24 nt, Artificial Sequence
  source: /note="Description of Artificial Sequence: Synthetic oligonucleotide"
uucaaaagugcaacuaugaaguga

SEQ ID NO: 1487 - RNA, 24 nt, Artificial Sequence
  source: /note="Description of Artificial Sequence: Synthetic oligonucleotide"
ucucucacccagucaucacuucau

SEQ ID NO: 1488 - RNA, 24 nt, Artificial Sequence
  source: /note="Description of Artificial Sequence: Synthetic oligonucleotide"
cucucucacccagucaucacuuca

SEQ ID NO: 1489 - RNA, 24 nt, Artificial Sequence
  source: /note="Description of Artificial Sequence: Synthetic oligonucleotide"
uauauauauauauauuuuucucuu

SEQ ID NO: 1490 - RNA, 24 nt, Artificial Sequence
  source: /note="Description of Artificial Sequence: Synthetic oligonucleotide"
ucucuuucuauagacagcuaauuc

SEQ ID NO: 1491 - RNA, 24 nt, Artificial Sequence
  source: /note="Description of Artificial Sequence: Synthetic oligonucleotide"
cucuuucuauagacagcuaauuca

SEQ ID NO: 1492 - RNA, 24 nt, Artificial Sequence
  source: /note="Description of Artificial Sequence: Synthetic oligonucleotide"
aaacaguaaaaaaaugaauuagcu

SEQ ID NO: 1493 - RNA, 24 nt, Artificial Sequence
  source: /note="Description of Artificial Sequence: Synthetic oligonucleotide"
ucuuucuauagacagcuaauucau

SEQ ID NO: 1494 - RNA, 24 nt, Artificial Sequence
  source: /note="Description of Artificial Sequence: Synthetic oligonucleotide"
aaaacaguaaaaaaaugaauuagc

SEQ ID NO: 1495 - RNA, 24 nt, Artificial Sequence
  source: /note="Description of Artificial Sequence: Synthetic oligonucleotide"
uauagacagcuaauucauuuuuuu

SEQ ID NO: 1496 - RNA, 24 nt, Artificial Sequence
  source: /note="Description of Artificial Sequence: Synthetic oligonucleotide"
uauucuguaauauaaaaauuuuaa

SEQ ID NO: 1497 - RNA, 24 nt, Artificial Sequence
  source: /note="Description of Artificial Sequence: Synthetic oligonucleotide"
auauucuguaauauaaaaauuuua

SEQ ID NO: 1498 - RNA, 24 nt, Artificial Sequence
  source: /note="Description of Artificial Sequence: Synthetic oligonucleotide"
uuuacuguuuuaaaauuuuuauau

SEQ ID NO: 1499 - RNA, 24 nt, Artificial Sequence
  source: /note="Description of Artificial Sequence: Synthetic oligonucleotide"
uuacuguuuuaaaauuuuuauauu

SEQ ID NO: 1500 - RNA, 24 nt, Artificial Sequence
  source: /note="Description of Artificial Sequence: Synthetic oligonucleotide"
uacuguuuuaaaauuuuuauauua

SEQ ID NO: 1501 - RNA, 24 nt, Artificial Sequence
  source: /note="Description of Artificial Sequence: Synthetic oligonucleotide"
acuguuuuaaaauuuuuauauuac

SEQ ID NO: 1502 - RNA, 24 nt, Artificial Sequence
  source: /note="Description of Artificial Sequence: Synthetic oligonucleotide"
cuguuuuaaaauuuuuauauuaca

SEQ ID NO: 1503 - RNA, 24 nt, Artificial Sequence
  source: /note="Description of Artificial Sequence: Synthetic oligonucleotide"
aaaauuuuuauauuacagaauaua

SEQ ID NO: 1504 - RNA, 24 nt, Artificial Sequence
  source: /note="Description of Artificial Sequence: Synthetic oligonucleotide"
aaauuuuuauauuacagaauauaa

SEQ ID NO: 1505 - RNA, 24 nt, Artificial Sequence
  source: /note="Description of Artificial Sequence: Synthetic oligonucleotide"
uuguagacuaucuuuuauauucug

SEQ ID NO: 1506 - RNA, 24 nt, Artificial Sequence
  source: /note="Description of Artificial Sequence: Synthetic oligonucleotide"
uauauuacagaauauaaaagauag

SEQ ID NO: 1507 - RNA, 24 nt, Artificial Sequence
  source: /note="Description of Artificial Sequence: Synthetic oligonucleotide"
auauuacagaauauaaaagauagu

SEQ ID NO: 1508 - RNA, 24 nt, Artificial Sequence
  source: /note="Description of Artificial Sequence: Synthetic oligonucleotide"
uauuacagaauauaaaagauaguc

SEQ ID NO: 1509 - RNA, 24 nt, Artificial Sequence
  source: /note="Description of Artificial Sequence: Synthetic oligonucleotide"
caaugcugcugucuucuugcuaug

SEQ ID NO: 1510 - RNA, 24 nt, Artificial Sequence
  source: /note="Description of Artificial Sequence: Synthetic oligonucleotide"
caaugggaaaaaguuaacaaaaug

SEQ ID NO: 1511 - RNA, 24 nt, Artificial Sequence
  source: /note="Description of Artificial Sequence: Synthetic oligonucleotide"
ugcaaguaucaagaaaaauauaug

SEQ ID NO: 1512 - RNA, 24 nt, Artificial Sequence
  source: /note="Description of Artificial Sequence: Synthetic oligonucleotide"
ucuugauacuugcagaaaugauuu

SEQ ID NO: 1513 - RNA, 24 nt, Artificial Sequence
  source: /note="Description of Artificial Sequence: Synthetic oligonucleotide"
cuugauacuugcagaaaugauuug

SEQ ID NO: 1514 - RNA, 24 nt, Artificial Sequence
  source: /note="Description of Artificial Sequence: Synthetic oligonucleotide"
uugauacuugcagaaaugauuugu

SEQ ID NO: 1515 - RNA, 24 nt, Artificial Sequence
  source: /note="Description of Artificial Sequence: Synthetic oligonucleotide"
uuuucagggaacuguagaauuuau

SEQ ID NO: 1516 - RNA, 24 nt, Artificial Sequence
  source: /note="Description of Artificial Sequence: Synthetic oligonucleotide"
cauggaggguacugaaauaaauuc

SEQ ID NO: 1517 - RNA, 24 nt, Artificial Sequence
  source: /note="Description of Artificial Sequence: Synthetic oligonucleotide"
ccauggaggguacugaaauaaauu

SEQ ID NO: 1518 - RNA, 24 nt, Artificial Sequence
  source: /note="Description of Artificial Sequence: Synthetic oligonucleotide"
cagggaacuguagaauuuauuuca

SEQ ID NO: 1519 - RNA, 24 nt, Artificial Sequence
  source: /note="Description of Artificial Sequence: Synthetic oligonucleotide"
uccauggaggguacugaaauaaau

SEQ ID NO: 1520 - RNA, 24 nt, Artificial Sequence
  source: /note="Description of Artificial Sequence: Synthetic oligonucleotide"
agggaacuguagaauuuauuucag

SEQ ID NO: 1521 - RNA, 24 nt, Artificial Sequence
  source: /note="Description of Artificial Sequence: Synthetic oligonucleotide"
uuccauggaggguacugaaauaaa

SEQ ID NO: 1522 - RNA, 24 nt, Artificial Sequence
  source: /note="Description of Artificial Sequence: Synthetic oligonucleotide"
ccugucuuuuuuccauggagggua

SEQ ID NO: 1523 - RNA, 24 nt, Artificial Sequence
  source: /note="Description of Artificial Sequence: Synthetic oligonucleotide"
cccugucuuuuuuccauggagggu

SEQ ID NO: 1524 - RNA, 24 nt, Artificial Sequence
  source: /note="Description of Artificial Sequence: Synthetic oligonucleotide"
ucccugucuuuuuuccauggaggg

SEQ ID NO: 1525 - RNA, 24 nt, Artificial Sequence
  source: /note="Description of Artificial Sequence: Synthetic oligonucleotide"
uuucaguacccuccauggaaaaaa

SEQ ID NO: 1526 - RNA, 24 nt, Artificial Sequence
  source: /note="Description of Artificial Sequence: Synthetic oligonucleotide"
aguacccuccauggaaaaaagaca

SEQ ID NO: 1527 - RNA, 24 nt, Artificial Sequence
  source: /note="Description of Artificial Sequence: Synthetic oligonucleotide"
aguuugcaugguucuugcucaagg

SEQ ID NO: 1528 - RNA, 24 nt, Artificial Sequence
  source: /note="Description of Artificial Sequence: Synthetic oligonucleotide"
auaagaaaaugcauuccuugagca

SEQ ID NO: 1529 - RNA, 24 nt, Artificial Sequence
  source: /note="Description of Artificial Sequence: Synthetic oligonucleotide"
cauaagaaaaugcauuccuugagc

SEQ ID NO: 1530 - RNA, 24 nt, Artificial Sequence
  source: /note="Description of Artificial Sequence: Synthetic oligonucleotide"
caugguucuugcucaaggaaugca

SEQ ID NO: 1531 - RNA, 24 nt, Artificial Sequence
  source: /note="Description of Artificial Sequence: Synthetic oligonucleotide"
accuacauguggaaauaaauuuuc

SEQ ID NO: 1532 - RNA, 24 nt, Artificial Sequence
  source: /note="Description of Artificial Sequence: Synthetic oligonucleotide"
gaccuacauguggaaauaaauuuu

SEQ ID NO: 1533 - RNA, 24 nt, Artificial Sequence
  source: /note="Description of Artificial Sequence: Synthetic oligonucleotide"
ugaccuacauguggaaauaaauuu

SEQ ID NO: 1534 - RNA, 24 nt, Artificial Sequence
  source: /note="Description of Artificial Sequence: Synthetic oligonucleotide"
cuuaugaaaauuuauuuccacaug

SEQ ID NO: 1535 - RNA, 24 nt, Artificial Sequence
  source: /note="Description of Artificial Sequence: Synthetic oligonucleotide"
uuaugaaaauuuauuuccacaugu

SEQ ID NO: 1536 - RNA, 24 nt, Artificial Sequence
  source: /note="Description of Artificial Sequence: Synthetic oligonucleotide"
auuacauuuuugaccuacaugugg

SEQ ID NO: 1537 - RNA, 24 nt, Artificial Sequence
  source: /note="Description of Artificial Sequence: Synthetic oligonucleotide"
cauuacauuuuugaccuacaugug

SEQ ID NO: 1538 - RNA, 24 nt, Artificial Sequence
  source: /note="Description of Artificial Sequence: Synthetic oligonucleotide"
ucauuacauuuuugaccuacaugu

SEQ ID NO: 1539 - RNA, 24 nt, Artificial Sequence
  source: /note="Description of Artificial Sequence: Synthetic oligonucleotide"
uuuccacauguaggucaaaaaugu

SEQ ID NO: 1540 - RNA, 24 nt, Artificial Sequence
  source: /note="Description of Artificial Sequence: Synthetic oligonucleotide"
cacauguaggucaaaaauguaaug

SEQ ID NO: 1541 - RNA, 24 nt, Artificial Sequence
  source: /note="Description of Artificial Sequence: Synthetic oligonucleotide"
uugcaauccagccaugauauuuuu

SEQ ID NO: 1542 - RNA, 24 nt, Artificial Sequence
  source: /note="Description of Artificial Sequence: Synthetic oligonucleotide"
acuguugguuuguugcaauccagc

SEQ ID NO: 1543 - RNA, 24 nt, Artificial Sequence
  source: /note="Description of Artificial Sequence: Synthetic oligonucleotide"
cacuguugguuuguugcaauccag

SEQ ID NO: 1544 - RNA, 24 nt, Artificial Sequence
  source: /note="Description of Artificial Sequence: Synthetic oligonucleotide"
aaugcucucauccauagucauagg

SEQ ID NO: 1545 - RNA, 24 nt, Artificial Sequence
  source: /note="Description of Artificial Sequence: Synthetic oligonucleotide"
augucucaguaaucuucuuaccua

SEQ ID NO: 1546 - RNA, 24 nt, Artificial Sequence
  source: /note="Description of Artificial Sequence: Synthetic oligonucleotide"
caaguuauuuaaugucucaguaau

SEQ ID NO: 1547 - RNA, 24 nt, Artificial Sequence
  source: /note="Description of Artificial Sequence: Synthetic oligonucleotide"
acaaguuauuuaaugucucaguaa

SEQ ID NO: 1548 - RNA, 24 nt, Artificial Sequence
  source: /note="Description of Artificial Sequence: Synthetic oligonucleotide"
gacucugaugacauauuuuucccc

SEQ ID NO: 1549 - RNA, 24 nt, Artificial Sequence
  source: /note="Description of Artificial Sequence: Synthetic oligonucleotide"
uccccaguaugguuccagaucaug

SEQ ID NO: 1550 - RNA, 24 nt, Artificial Sequence
  source: /note="Description of Artificial Sequence: Synthetic oligonucleotide"
ccccaguaugguuccagaucaugu

SEQ ID NO: 1551 - RNA, 24 nt, Artificial Sequence
  source: /note="Description of Artificial Sequence: Synthetic oligonucleotide"
cccaguaugguuccagaucauguc

SEQ ID NO: 1552 - RNA, 24 nt, Artificial Sequence
  source: /note="Description of Artificial Sequence: Synthetic oligonucleotide"
uauuugucuuuguguaugugugua

SEQ ID NO: 1553 - RNA, 24 nt, Artificial Sequence
  source: /note="Description of Artificial Sequence: Synthetic oligonucleotide"
ucuuuguguauguguguaugugua

SEQ ID NO: 1554 - RNA, 24 nt, Artificial Sequence
  source: /note="Description of Artificial Sequence: Synthetic oligonucleotide"
uguauguguguauguguauguguu

SEQ ID NO: 1555 - RNA, 24 nt, Artificial Sequence
  source: /note="Description of Artificial Sequence: Synthetic oligonucleotide"
aggccagaccuauuugacuggaau

SEQ ID NO: 1556 - RNA, 24 nt, Artificial Sequence
  source: /note="Description of Artificial Sequence: Synthetic oligonucleotide"
ggccagaccuauuugacuggaaua

SEQ ID NO: 1557 - RNA, 24 nt, Artificial Sequence
  source: /note="Description of Artificial Sequence: Synthetic oligonucleotide"
acuggaauagugugguuugccagc

SEQ ID NO: 1558 - RNA, 24 nt, Artificial Sequence
  source: /note="Description of Artificial Sequence: Synthetic oligonucleotide"
ccagcagucagccacacaacgacu

SEQ ID NO: 1559 - RNA, 24 nt, Artificial Sequence
  source: /note="Description of Artificial Sequence: Synthetic oligonucleotide"
ucuaugccuaauugauaucuggcg

SEQ ID NO: 1560 - RNA, 24 nt, Artificial Sequence
  source: /note="Description of Artificial Sequence: Synthetic oligonucleotide"
ccaaccuucaggaucgaguaguuu

SEQ ID NO: 1561 - RNA, 24 nt, Artificial Sequence
  source: /note="Description of Artificial Sequence: Synthetic oligonucleotide"
uggacuaccacugcuuuuaguaug

SEQ ID NO: 1562 - RNA, 24 nt, Artificial Sequence
  source: /note="Description of Artificial Sequence: Synthetic oligonucleotide"
aguaugguagaguuuaauguuuuc

SEQ ID NO: 1563 - RNA, 24 nt, Artificial Sequence
  source: /note="Description of Artificial Sequence: Synthetic oligonucleotide"
guaugguagaguuuaauguuuuca

SEQ ID NO: 1564 - RNA, 24 nt, Artificial Sequence
  source: /note="Description of Artificial Sequence: Synthetic oligonucleotide"
agacucuaaaaggauaaugaacaa

SEQ ID NO: 1565 - RNA, 24 nt, Artificial Sequence
  source: /note="Description of Artificial Sequence: Synthetic oligonucleotide"
acuuugauuuguucauuauccuuu

SEQ ID NO: 1566 - RNA, 24 nt, Artificial Sequence
  source: /note="Description of Artificial Sequence: Synthetic oligonucleotide"
uauauuugagacucuaaaaggaua

SEQ ID NO: 1567 - RNA, 24 nt, Artificial Sequence
  source: /note="Description of Artificial Sequence: Synthetic oligonucleotide"
auuuguucauuauccuuuuagagu

SEQ ID NO: 1568 - RNA, 24 nt, Artificial Sequence
  source: /note="Description of Artificial Sequence: Synthetic oligonucleotide"
guuucuauauuugagacucuaaaa

SEQ ID NO: 1569 - RNA, 24 nt, Artificial Sequence
  source: /note="Description of Artificial Sequence: Synthetic oligonucleotide"
gguuucuauauuugagacucuaaa

SEQ ID NO: 1570 - RNA, 24 nt, Artificial Sequence
  source: /note="Description of Artificial Sequence: Synthetic oligonucleotide"
ugguuucuauauuugagacucuaa

SEQ ID NO: 1571 - RNA, 24 nt, Artificial Sequence
  source: /note="Description of Artificial Sequence: Synthetic oligonucleotide"
uucauuauccuuuuagagucucaa

SEQ ID NO: 1572 - RNA, 24 nt, Artificial Sequence
  source: /note="Description of Artificial Sequence: Synthetic oligonucleotide"
agagucucaaauauagaaaccaaa

SEQ ID NO: 1573 - RNA, 24 nt, Artificial Sequence
  source: /note="Description of Artificial Sequence: Synthetic oligonucleotide"
gagucucaaauauagaaaccaaaa

SEQ ID NO: 1574 - RNA, 24 nt, Artificial Sequence
  source: /note="Description of Artificial Sequence: Synthetic oligonucleotide"
cacuuccuggauggcuucaaugcu

SEQ ID NO: 1575 - RNA, 24 nt, Artificial Sequence
  source: /note="Description of Artificial Sequence: Synthetic oligonucleotide"
gccucaacaagugagcauugaagc

SEQ ID NO: 1576 - RNA, 24 nt, Artificial Sequence
  source: /note="Description of Artificial Sequence: Synthetic oligonucleotide"
ccucaacaagugagcauugaagcc

SEQ ID NO: 1577 - RNA, 24 nt, Artificial Sequence
  source: /note="Description of Artificial Sequence: Synthetic oligonucleotide"
gguggccuuggcaacauuuccacu

SEQ ID NO: 1578 - RNA, 24 nt, Artificial Sequence
  source: /note="Description of Artificial Sequence: Synthetic oligonucleotide"
gucacuuuagguggccuuggcaac

SEQ ID NO: 1579 - RNA, 24 nt, Artificial Sequence
  source: /note="Description of Artificial Sequence: Synthetic oligonucleotide"
augauguaacugaaaauguucuuc

SEQ ID NO: 1580 - RNA, 24 nt, Artificial Sequence
  source: /note="Description of Artificial Sequence: Synthetic oligonucleotide"
ccuguugagaauagugcauuugau

SEQ ID NO: 1581 - RNA, 24 nt, Artificial Sequence
  source: /note="Description of Artificial Sequence: Synthetic oligonucleotide"
caguuacaucaucaaaugcacuau

SEQ ID NO: 1582 - RNA, 24 nt, Artificial Sequence
  source: /note="Description of Artificial Sequence: Synthetic oligonucleotide"
aguuacaucaucaaaugcacuauu

SEQ ID NO: 1583 - RNA, 24 nt, Artificial Sequence
  source: /note="Description of Artificial Sequence: Synthetic oligonucleotide"
cacacuuuaccuguugagaauagu

SEQ ID NO: 1584 - RNA, 24 nt, Artificial Sequence
  source: /note="Description of Artificial Sequence: Synthetic oligonucleotide"
cuguuuuauaugcauuuuuaggua

SEQ ID NO: 1585 - RNA, 24 nt, Artificial Sequence
  source: /note="Description of Artificial Sequence: Synthetic oligonucleotide"
uguuuuauaugcauuuuuagguau

SEQ ID NO: 1586 - RNA, 24 nt, Artificial Sequence
  source: /note="Description of Artificial Sequence: Synthetic oligonucleotide"
auaugcauuuuuagguauuacgug

SEQ ID NO: 1587 - RNA, 24 nt, Artificial Sequence
  source: /note="Description of Artificial Sequence: Synthetic oligonucleotide"
uaugcauuuuuagguauuacgugc

SEQ ID NO: 1588 - RNA, 24 nt, Artificial Sequence
  source: /note="Description of Artificial Sequence: Synthetic oligonucleotide"
uagguauuacgugcacauauauau

SEQ ID NO: 1589 - RNA, 24 nt, Artificial Sequence
  source: /note="Description of Artificial Sequence: Synthetic oligonucleotide"
agguauuacgugcacauauauaua

SEQ ID NO: 1590 - RNA, 24 nt, Artificial Sequence
  source: /note="Description of Artificial Sequence: Synthetic oligonucleotide"
gguauuacgugcacauauauauau

SEQ ID NO: 1591 - RNA, 24 nt, Artificial Sequence
  source: /note="Description of Artificial Sequence: Synthetic oligonucleotide"
agcaacaacuauaauauugugcag

SEQ ID NO: 1592 - RNA, 24 nt, Artificial Sequence
  source: /note="Description of Artificial Sequence: Synthetic oligonucleotide"
guuccuccaucuuucucuuuuuau

SEQ ID NO: 1593 - RNA, 24 nt, Artificial Sequence
  source: /note="Description of Artificial Sequence: Synthetic oligonucleotide"
ucuuuuuauggaguucacuaggug

SEQ ID NO: 1594 - RNA, 24 nt, Artificial Sequence
  source: /note="Description of Artificial Sequence: Synthetic oligonucleotide"
uauggaguucacuaggugcaccau

SEQ ID NO: 1595 - RNA, 24 nt, Artificial Sequence
  source: /note="Description of Artificial Sequence: Synthetic oligonucleotide"
auggaguucacuaggugcaccauu

SEQ ID NO: 1596 - RNA, 24 nt, Artificial Sequence
  source: /note="Description of Artificial Sequence: Synthetic oligonucleotide"
uggaguucacuaggugcaccauuc

SEQ ID NO: 1597 - RNA, 24 nt, Artificial Sequence
  source: /note="Description of Artificial Sequence: Synthetic oligonucleotide"
auaauugcaucugaacauuugguc

SEQ ID NO: 1598 - RNA, 24 nt, Artificial Sequence
  source: /note="Description of Artificial Sequence: Synthetic oligonucleotide"
guccuuugcagggugagugagcga

SEQ ID NO: 1599 - RNA, 24 nt, Artificial Sequence
  source: /note="Description of Artificial Sequence: Synthetic oligonucleotide"
uuccaaagcagccucucgcucacu

SEQ ID NO: 1600 - RNA, 24 nt, Artificial Sequence
  source: /note="Description of Artificial Sequence: Synthetic oligonucleotide"
cagggugagugagcgagaggcugc

SEQ ID NO: 1601 - RNA, 24 nt, Artificial Sequence
  source: /note="Description of Artificial Sequence: Synthetic oligonucleotide"
gaagaaacucauagauuacugcaa

SEQ ID NO: 1602 - RNA, 24 nt, Artificial Sequence
  source: /note="Description of Artificial Sequence: Synthetic oligonucleotide"
cagguccagggggaacuguugcag

SEQ ID NO: 1603 - RNA, 24 nt, Artificial Sequence
  source: /note="Description of Artificial Sequence: Synthetic oligonucleotide"
ccagguccagggggaacuguugca

SEQ ID NO: 1604 - RNA, 24 nt, Artificial Sequence
  source: /note="Description of Artificial Sequence: Synthetic oligonucleotide"
agcuucuguaagccaggcaagaaa

SEQ ID NO: 1605 - RNA, 24 nt, Artificial Sequence
  source: /note="Description of Artificial Sequence: Synthetic oligonucleotide"
uugccuggcuuacagaagcugaaa

SEQ ID NO: 1606 - RNA, 24 nt, Artificial Sequence
  source: /note="Description of Artificial Sequence: Synthetic oligonucleotide"
cuuacggguagcauccuguaggac

SEQ ID NO: 1607 - RNA, 24 nt, Artificial Sequence
  source: /note="Description of Artificial Sequence: Synthetic oligonucleotide"
cucccuuggagucuucuaggagcc

SEQ ID NO: 1608 - RNA, 24 nt, Artificial Sequence
  source: /note="Description of Artificial Sequence: Synthetic oligonucleotide"
acucccuuggagucuucuaggagc

SEQ ID NO: 1609 - RNA, 24 nt, Artificial Sequence
  source: /note="Description of Artificial Sequence: Synthetic oligonucleotide"
aucagcucuuuuacucccuuggag

SEQ ID NO: 1610 - RNA, 24 nt, Artificial Sequence
  source: /note="Description of Artificial Sequence: Synthetic oligonucleotide"
cgcuuuagcacucuuguggaucca

SEQ ID NO: 1611 - RNA, 24 nt, Artificial Sequence
  source: /note="Description of Artificial Sequence: Synthetic oligonucleotide"
gcacucuuguggauccaauugaac

SEQ ID NO: 1612 - RNA, 24 nt, Artificial Sequence
  source: /note="Description of Artificial Sequence: Synthetic oligonucleotide"
ucccuggcuugucaguuacaagua

SEQ ID NO: 1613 - RNA, 24 nt, Artificial Sequence
  source: /note="Description of Artificial Sequence: Synthetic oligonucleotide"
gucccuggcuugucaguuacaagu

SEQ ID NO: 1614 - RNA, 24 nt, Artificial Sequence
  source: /note="Description of Artificial Sequence: Synthetic oligonucleotide"
uuuugucccuggcuugucaguuac

SEQ ID NO: 1615 - RNA, 24 nt, Artificial Sequence
  source: /note="Description of Artificial Sequence: Synthetic oligonucleotide"
guuuugucccuggcuugucaguua

SEQ ID NO: 1616 - RNA, 24 nt, Artificial Sequence
  source: /note="Description of Artificial Sequence: Synthetic oligonucleotide"
uacuuguaacugacaagccaggga

SEQ ID NO: 1617 - RNA, 24 nt, Artificial Sequence
  source: /note="Description of Artificial Sequence: Synthetic oligonucleotide"
gcuccuacucagacuguuacucug

SEQ ID NO: 1618 - RNA, 24 nt, Artificial Sequence
  source: /note="Description of Artificial Sequence: Synthetic oligonucleotide"
uaccauguauugcuaaacaaagua

SEQ ID NO: 1619 - RNA, 24 nt, Artificial Sequence
  source: /note="Description of Artificial Sequence: Synthetic oligonucleotide"
auugaagaguaacaauuugagcca

SEQ ID NO: 1620 - RNA, 24 nt, Artificial Sequence
  source: /note="Description of Artificial Sequence: Synthetic oligonucleotide"
aggcucugcaaaguucuuugaaag

SEQ ID NO: 1621 - RNA, 24 nt, Artificial Sequence
  source: /note="Description of Artificial Sequence: Synthetic oligonucleotide"
aaagagcaacaaaauggcuucaac

SEQ ID NO: 1622 - RNA, 24 nt, Artificial Sequence
  source: /note="Description of Artificial Sequence: Synthetic oligonucleotide"
aaagagcaauaaaauggcuucaac

SEQ ID NO: 1623 - RNA, 24 nt, Artificial Sequence
  source: /note="Description of Artificial Sequence: Synthetic oligonucleotide"
aaagaacuuugcagagccucaaaa

SEQ ID NO: 1624 - RNA, 24 nt, Artificial Sequence
  source: /note="Description of Artificial Sequence: Synthetic oligonucleotide"
cugaauaucuaugcauuaauaacu

SEQ ID NO: 1625 - RNA, 24 nt, Artificial Sequence
  source: /note="Description of Artificial Sequence: Synthetic oligonucleotide"
uauuauauuacagggcauauuaua

SEQ ID NO: 1626 - RNA, 24 nt, Artificial Sequence
  source: /note="Description of Artificial Sequence: Synthetic oligonucleotide"
agguaagccgagguuuggccuuua

SEQ ID NO: 1627 - RNA, 24 nt, Artificial Sequence
  source: /note="Description of Artificial Sequence: Synthetic oligonucleotide"
cccagaguccuucaaagauauuga

SEQ ID NO: 1628 - DNA, 19 bp, Artificial Sequence
  source: /note="Description of Artificial Sequence: Synthetic oligonucleotide"
attggctttgatttcccta

SEQ ID NO: 1629 - DNA, 19 bp, Artificial Sequence
  source: /note="Description of Artificial Sequence: Synthetic oligonucleotide"
tgtagagtaagtcagccta

SEQ ID NO: 1630 - DNA, 19 bp, Artificial Sequence
  source: /note="Description of Artificial Sequence: Synthetic oligonucleotide"
cctactcagactgttactc

SEQ ID NO: 1631 - DNA, 19 bp, Artificial Sequence
  source: /note="Description of Artificial Sequence: Synthetic oligonucleotide"
ttggacagaacttaccgac

SEQ ID NO: 1632 - DNA, 19 bp, Artificial Sequence
  source: /note="Description of Artificial Sequence: Synthetic oligonucleotide"
cagttgcctaagaactggt

SEQ ID NO: 1633 - DNA, 19 bp, Artificial Sequence
  source: /note="Description of Artificial Sequence: Synthetic oligonucleotide"
gggctccaccctcacgagt

SEQ ID NO: 1634 - DNA, 19 bp, Artificial Sequence
  source: /note="Description of Artificial Sequence: Synthetic oligonucleotide"
tttgcttcgctataaaacg

SEQ ID NO: 1635 - DNA, 19 bp, Artificial Sequence
  source: /note="Description of Artificial Sequence: Synthetic oligonucleotide"
tctgaggatggggccgcaa

SEQ ID NO: 1636 - DNA, 19 bp, Artificial Sequence
  source: /note="Description of Artificial Sequence: Synthetic oligonucleotide"
gatctgtcaaatcgcctgc

SEQ ID NO: 1637 - DNA, 19 bp, Artificial Sequence
  source: /note="Description of Artificial Sequence: Synthetic oligonucleotide"
ccaggatggcattgggcag

SEQ ID NO: 1638 - DNA, 19 bp, Artificial Sequence
  source: /note="Description of Artificial Sequence: Synthetic oligonucleotide"
ctgaatctgcggtggcagg

SEQ ID NO: 1639 - DNA, 19 bp, Artificial Sequence
  source: /note="Description of Artificial Sequence: Synthetic oligonucleotide"
ttcttttgttcttctagcc

SEQ ID NO: 1640 - DNA, 19 bp, Artificial Sequence
  source: /note="Description of Artificial Sequence: Synthetic oligonucleotide"
gaaaagcttgagcaagtca

SEQ ID NO: 1641 - DNA, 19 bp, Artificial Sequence
  source: /note="Description of Artificial Sequence: Synthetic oligonucleotide"
gaagagttgcccctgcgcc

SEQ ID NO: 1642 - DNA, 19 bp, Artificial Sequence
  source: /note="Description of Artificial Sequence: Synthetic oligonucleotide"
acaaatctccagtggataa

SEQ ID NO: 1643 - DNA, 19 bp, Artificial Sequence
  source: /note="Description of Artificial Sequence: Synthetic oligonucleotide"
tgtttctcaggtaaagctc

SEQ ID NO: 1644 - DNA, 19 bp, Artificial Sequence
  source: /note="Description of Artificial Sequence: Synthetic oligonucleotide"
gaaggaccatttgacgtta

SEQ ID NO: 1645 - DNA, 19 bp, Artificial Sequence
  source: /note="Description of Artificial Sequence: Synthetic oligonucleotide"
aactgctatttcagtttcc

SEQ ID NO: 1646 - DNA, 19 bp, Artificial Sequence
  source: /note="Description of Artificial Sequence: Synthetic oligonucleotide"
ccagccactcagccagtga

SEQ ID NO: 1647 - DNA, 19 bp, Artificial Sequence
  source: /note="Description of Artificial Sequence: Synthetic oligonucleotide"
gtatgcttttctgttaaag

SEQ ID NO: 1648 - DNA, 19 bp, Artificial Sequence
  source: /note="Description of Artificial Sequence: Synthetic oligonucleotide"
ctcctggactgaccactat

SEQ ID NO: 1649 - DNA, 19 bp, Artificial Sequence
  source: /note="Description of Artificial Sequence: Synthetic oligonucleotide"
gaacagaggcgtccccagt

SEQ ID NO: 1650 - DNA, 19 bp, Artificial Sequence
  source: /note="Description of Artificial Sequence: Synthetic oligonucleotide"
gaggctagaacaatcatta

SEQ ID NO: 1651 - DNA, 19 bp, Artificial Sequence
  source: /note="Description of Artificial Sequence: Synthetic oligonucleotide"
acaagaacaccttcagaac

SEQ ID NO: 1652 - DNA, 19 bp, Artificial Sequence
  source: /note="Description of Artificial Sequence: Synthetic oligonucleotide"
ggtttctgtgattttcttt

SEQ ID NO: 1653 - DNA, 19 bp, Artificial Sequence
  source: /note="Description of Artificial Sequence: Synthetic oligonucleotide"
ggccaaagacctccgccag

SEQ ID NO: 1654 - DNA, 19 bp, Artificial Sequence
  source: /note="Description of Artificial Sequence: Synthetic oligonucleotide"
ttggagaagcattcataaa

SEQ ID NO: 1655 - DNA, 19 bp, Artificial Sequence
  source: /note="Description of Artificial Sequence: Synthetic oligonucleotide"
tcgctcactcaccctgcaa

SEQ ID NO: 1656 - DNA, 19 bp, Artificial Sequence
  source: /note="Description of Artificial Sequence: Synthetic oligonucleotide"
aaaagagctgatgaaacaa

SEQ ID NO: 1657 - DNA, 19 bp, Artificial Sequence
  source: /note="Description of Artificial Sequence: Synthetic oligonucleotide"
tacacttttcaaaatgctt

SEQ ID NO: 1658 - DNA, 19 bp, Artificial Sequence
  source: /note="Description of Artificial Sequence: Synthetic oligonucleotide"
gagatgatcatcaagcaga

SEQ ID NO: 1659 - DNA, 19 bp, Artificial Sequence
  source: /note="Description of Artificial Sequence: Synthetic oligonucleotide"
ctttgaaagagcaataaaa

SEQ ID NO: 1660 - DNA, 19 bp, Artificial Sequence
  source: /note="Description of Artificial Sequence: Synthetic oligonucleotide"
cacaaaagtcaaatcggaa

SEQ ID NO: 1661 - DNA, 19 bp, Artificial Sequence
  source: /note="Description of Artificial Sequence: Synthetic oligonucleotide"
atttcaatataagattcgg

SEQ ID NO: 1662 - DNA, 19 bp, Artificial Sequence
  source: /note="Description of Artificial Sequence: Synthetic oligonucleotide"
cttaagcaatcccgaactc

SEQ ID NO: 1663 - DNA, 19 bp, Artificial Sequence
  source: /note="Description of Artificial Sequence: Synthetic oligonucleotide"
ccttctttatcccctatcg

SEQ ID NO: 1664 - DNA, 19 bp, Artificial Sequence
  source: /note="Description of Artificial Sequence: Synthetic oligonucleotide"
aggccaaacctcggcttac

SEQ ID NO: 1665 - DNA, 19 bp, Artificial Sequence
  source: /note="Description of Artificial Sequence: Synthetic oligonucleotide"
ttcgaaaatttcaggtaag

SEQ ID NO: 1666 - DNA, 19 bp, Artificial Sequence
  source: /note="Description of Artificial Sequence: Synthetic oligonucleotide"
gcagaacaggagataacag

SEQ ID NO: 1667 - DNA, 19 bp, Artificial Sequence
  source: /note="Description of Artificial Sequence: Synthetic oligonucleotide"
gcggccctcgcccttctct

SEQ ID NO: 1668 - DNA, 19 bp, Artificial Sequence
  source: /note="Description of Artificial Sequence: Synthetic oligonucleotide"
tagtgatcgtggatacgag

SEQ ID NO: 1669 - DNA, 19 bp, Artificial Sequence
  source: /note="Description of Artificial Sequence: Synthetic oligonucleotide"
tacagccctcggtgtatat

SEQ ID NO: 1670 - DNA, 19 bp, Artificial Sequence
  source: /note="Description of Artificial Sequence: Synthetic oligonucleotide"
ggaaggaattaagcccgaa

SEQ ID NO: 1671 - DNA, 19 bp, Artificial Sequence
  source: /note="Description of Artificial Sequence: Synthetic oligonucleotide"
ggaacagctttcgtagttg

SEQ ID NO: 1672 - DNA, 19 bp, Artificial Sequence
  source: /note="Description of Artificial Sequence: Synthetic oligonucleotide"
ataaagtccagtgtcgatc

SEQ ID NO: 1673 - DNA, 19 bp, Artificial Sequence
  source: /note="Description of Artificial Sequence: Synthetic oligonucleotide"
aaaaccagagcttcggtca

SEQ ID NO: 1674 - DNA, 21 bp, Artificial Sequence
  source: /note="Description of Artificial Sequence: Synthetic oligonucleotide"
gagtcttctgggcaggcttaa

SEQ ID NO: 1675 - DNA, 21 bp, Artificial Sequence
  source: /note="Description of Artificial Sequence: Synthetic oligonucleotide"
tcgggtgagcatgtctttaat

SEQ ID NO: 1676 - DNA, 19 bp, Artificial Sequence
  source: /note="Description of Artificial Sequence: Synthetic oligonucleotide"
gtgtcaccagagtaacagt

SEQ ID NO: 1677 - DNA, 19 bp, Artificial Sequence
  source: /note="Description of Artificial Sequence: Synthetic oligonucleotide"
tgatcatcaagcagaaggt

SEQ ID NO: 1678 - DNA, 20 bp, Artificial Sequence
  source: /note="Description of Artificial Sequence: Synthetic oligonucleotide"
aacttcgaaaatttcaggta

SEQ ID NO: 1679 - DNA, 20 bp, Artificial Sequence
  source: /note="Description of Artificial Sequence: Synthetic oligonucleotide"
gaaactcatcaaatatgcgt

SEQ ID NO: 1680 - DNA, 20 bp, Artificial Sequence
  source: /note="Description of Artificial Sequence: Synthetic oligonucleotide"
tcatttacactaacacgcat

SEQ ID NO: 1681 - DNA, 20 bp, Artificial Sequence
  source: /note="Description of Artificial Sequence: Synthetic oligonucleotide"
gaatgaaactcatcaaatat

SEQ ID NO: 1682 - DNA, 20 bp, Artificial Sequence
  source: /note="Description of Artificial Sequence: Synthetic oligonucleotide"
tcatcaatatctttgaagga

SEQ ID NO: 1683 - DNA, 20 bp, Artificial Sequence
  source: /note="Description of Artificial Sequence: Synthetic oligonucleotide"
tgttttcataggaaaaatag

SEQ ID NO: 1684 - DNA, 20 bp, Artificial Sequence
  source: /note="Description of Artificial Sequence: Synthetic oligonucleotide"
aattggaaaatgtgatggga

SEQ ID NO: 1685 - DNA, 20 bp, Artificial Sequence
  source: /note="Description of Artificial Sequence: Synthetic oligonucleotide"
atgatcatcaagcagaaggt

SEQ ID NO: 1686 - DNA, 20 bp, Artificial Sequence
  source: /note="Description of Artificial Sequence: Synthetic oligonucleotide"
agatgatcatcaagcagaag

SEQ ID NO: 1687 - DNA, 20 bp, Artificial Sequence
  source: /note="Description of Artificial Sequence: Synthetic oligonucleotide"
cattttttctcataccttct

SEQ ID NO: 1688 - DNA, 20 bp, Artificial Sequence
  source: /note="Description of Artificial Sequence: Synthetic oligonucleotide"
tcctactcagactgttactc

SEQ ID NO: 1689 - DNA, 20 bp, Artificial Sequence
  source: /note="Description of Artificial Sequence: Synthetic oligonucleotide"
acaggttgtgtcaccagagt

SEQ ID NO: 1690 - DNA, 20 bp, Artificial Sequence
  source: /note="Description of Artificial Sequence: Synthetic oligonucleotide"
ttatcattttttctcatacc

SEQ ID NO: 1691 - DNA, 20 bp, Artificial Sequence
  source: /note="Description of Artificial Sequence: Synthetic oligonucleotide"
ttgcctaagaactggtggga

SEQ ID NO: 1692 - DNA, 20 bp, Artificial Sequence
  source: /note="Description of Artificial Sequence: Synthetic oligonucleotide"
aaacagttgcctaagaactg

SEQ ID NO: 1693 - DNA, 20 bp, Artificial Sequence
  source: /note="Description of Artificial Sequence: Synthetic oligonucleotide"
tttcccaccagttcttaggc

SEQ ID NO: 1694 - DNA, 20 bp, Artificial Sequence
  source: /note="Description of Artificial Sequence: Synthetic oligonucleotide"
tggctttgatttccctaggg

SEQ ID NO: 1695 - DNA, 20 bp, Artificial Sequence
  source: /note="Description of Artificial Sequence: Synthetic oligonucleotide"
tagggaaatcaaagccaatg

SEQ ID NO: 1696 - DNA, 20 bp, Artificial Sequence
  source: /note="Description of Artificial Sequence: Synthetic oligonucleotide"
gaccctagggaaatcaaagc

SEQ ID NO: 1697 - DNA, 20 bp, Artificial Sequence
  source: /note="Description of Artificial Sequence: Synthetic oligonucleotide"
tgagggctccaccctcacga

SEQ ID NO: 1698 - DNA, 20 bp, Artificial Sequence
  source: /note="Description of Artificial Sequence: Synthetic oligonucleotide"
aaggattgagggctccaccc

SEQ ID NO: 1699 - DNA, 20 bp, Artificial Sequence
  source: /note="Description of Artificial Sequence: Synthetic oligonucleotide"
gctccaccctcacgagtggg

SEQ ID NO: 1700 - DNA, 20 bp, Artificial Sequence
  source: /note="Description of Artificial Sequence: Synthetic oligonucleotide"
tatcccctatcgaggaaacc

SEQ ID NO: 1701 - DNA, 20 bp, Artificial Sequence
  source: /note="Description of Artificial Sequence: Synthetic oligonucleotide"
gataaagaaggcctatttca

SEQ ID NO: 1702 - DNA, 20 bp, Artificial Sequence
  source: /note="Description of Artificial Sequence: Synthetic oligonucleotide"
aggccttctttatcccctat

SEQ ID NO: 1703 - DNA, 20 bp, Artificial Sequence
  source: /note="Description of Artificial Sequence: Synthetic oligonucleotide"
tgagggctccaccctcacga

SEQ ID NO: 1704 - DNA, 20 bp, Artificial Sequence
  source: /note="Description of Artificial Sequence: Synthetic oligonucleotide"
gataaagaaggcctatttca

SEQ ID NO: 1705 - DNA, 19 bp, Artificial Sequence
  source: /note="Description of Artificial Sequence: Synthetic oligonucleotide"
attggctttgatttcccta

SEQ ID NO: 1706 - DNA, 19 bp, Artificial Sequence
  source: /note="Description of Artificial Sequence: Synthetic oligonucleotide"
tgtagagtaagtcagccta

SEQ ID NO: 1707 - DNA, 19 bp, Artificial Sequence
  source: /note="Description of Artificial Sequence: Synthetic oligonucleotide"
cctactcagactgttactc

SEQ ID NO: 1708 - DNA, 19 bp, Artificial Sequence
  source: /note="Description of Artificial Sequence: Synthetic oligonucleotide"
ttggacagaacttaccgac

SEQ ID NO: 1709 - DNA, 19 bp, Artificial Sequence
  source: /note="Description of Artificial Sequence: Synthetic oligonucleotide"
cagttgcctaagaactggt

SEQ ID NO: 1710 - DNA, 19 bp, Artificial Sequence
  source: /note="Description of Artificial Sequence: Synthetic oligonucleotide"
gggctccaccctcacgagt

SEQ ID NO: 1711 - DNA, 19 bp, Artificial Sequence
  source: /note="Description of Artificial Sequence: Synthetic oligonucleotide"
tttgcttcgctataaaacg

SEQ ID NO: 1712 - DNA, 19 bp, Artificial Sequence
  source: /note="Description of Artificial Sequence: Synthetic oligonucleotide"
tctgaggatggggccgcaa

SEQ ID NO: 1713 - DNA, 19 bp, Artificial Sequence
  source: /note="Description of Artificial Sequence: Synthetic oligonucleotide"
gatctgtcaaatcgcctgc

SEQ ID NO: 1714 - DNA, 19 bp, Artificial Sequence
  source: /note="Description of Artificial Sequence: Synthetic oligonucleotide"
ccaggatggcattgggcag

SEQ ID NO: 1715 - DNA, 19 bp, Artificial Sequence
  source: /note="Description of Artificial Sequence: Synthetic oligonucleotide"
ctgaatctgcggtggcagg

SEQ ID NO: 1716 - DNA, 19 bp, Artificial Sequence
  source: /note="Description of Artificial Sequence: Synthetic oligonucleotide"
ttcttttgttcttctagcc

SEQ ID NO: 1717 - DNA, 19 bp, Artificial Sequence
  source: /note="Description of Artificial Sequence: Synthetic oligonucleotide"
gaaaagcttgagcaagtca

SEQ ID NO: 1718 - DNA, 19 bp, Artificial Sequence
  source: /note="Description of Artificial Sequence: Synthetic oligonucleotide"
gaagagttgcccctgcgcc

SEQ ID NO: 1719 - DNA, 19 bp, Artificial Sequence
  source: /note="Description of Artificial Sequence: Synthetic oligonucleotide"
acaaatctccagtggataa

SEQ ID NO: 1720 - DNA, 19 bp, Artificial Sequence
  source: /note="Description of Artificial Sequence: Synthetic oligonucleotide"
tgtttctcaggtaaagctc

SEQ ID NO: 1721 - DNA, 19 bp, Artificial Sequence
  source: /note="Description of Artificial Sequence: Synthetic oligonucleotide"
gaaggaccatttgacgtta

SEQ ID NO: 1722 - DNA, 19 bp, Artificial Sequence
  source: /note="Description of Artificial Sequence: Synthetic oligonucleotide"
aactgctatttcagtttcc

SEQ ID NO: 1723 - DNA, 19 bp, Artificial Sequence
  source: /note="Description of Artificial Sequence: Synthetic oligonucleotide"
ccagccactcagccagtga

SEQ ID NO: 1724 - DNA, 19 bp, Artificial Sequence
  source: /note="Description of Artificial Sequence: Synthetic oligonucleotide"
gtatgcttttctgttaaag

SEQ ID NO: 1725 - DNA, 19 bp, Artificial Sequence
  source: /note="Description of Artificial Sequence: Synthetic oligonucleotide"
ctcctggactgaccactat

SEQ ID NO: 1726 - DNA, 19 bp, Artificial Sequence
  source: /note="Description of Artificial Sequence: Synthetic oligonucleotide"
gaacagaggcgtccccagt

SEQ ID NO: 1727 - DNA, 19 bp, Artificial Sequence
  source: /note="Description of Artificial Sequence: Synthetic oligonucleotide"
gaggctagaacaatcatta

SEQ ID NO: 1728 - DNA, 19 bp, Artificial Sequence
  source: /note="Description of Artificial Sequence: Synthetic oligonucleotide"
acaagaacaccttcagaac

SEQ ID NO: 1729 - DNA, 19 bp, Artificial Sequence
  source: /note="Description of Artificial Sequence: Synthetic oligonucleotide"
ggtttctgtgattttcttt

SEQ ID NO: 1730 - DNA, 19 bp, Artificial Sequence
  source: /note="Description of Artificial Sequence: Synthetic oligonucleotide"
ggccaaagacctccgccag

SEQ ID NO: 1731 - DNA, 19 bp, Artificial Sequence
  source: /note="Description of Artificial Sequence: Synthetic oligonucleotide"
ttggagaagcattcataaa

SEQ ID NO: 1732 - DNA, 19 bp, Artificial Sequence
  source: /note="Description of Artificial Sequence: Synthetic oligonucleotide"
tcgctcactcaccctgcaa

SEQ ID NO: 1733 - DNA, 19 bp, Artificial Sequence
  source: /note="Description of Artificial Sequence: Synthetic oligonucleotide"
aaaagagctgatgaaacaa

SEQ ID NO: 1734 - DNA, 19 bp, Artificial Sequence
  source: /note="Description of Artificial Sequence: Synthetic oligonucleotide"
tacacttttcaaaatgctt

SEQ ID NO: 1735 - DNA, 19 bp, Artificial Sequence
  source: /note="Description of Artificial Sequence: Synthetic oligonucleotide"
gagatgatcatcaagcaga

SEQ ID NO: 1736 - DNA, 19 bp, Artificial Sequence
  source: /note="Description of Artificial Sequence: Synthetic oligonucleotide"
ctttgaaagagcaataaaa

SEQ ID NO: 1737 - DNA, 19 bp, Artificial Sequence
  source: /note="Description of Artificial Sequence: Synthetic oligonucleotide"
cacaaaagtcaaatcggaa

SEQ ID NO: 1738 - DNA, 19 bp, Artificial Sequence
  source: /note="Description of Artificial Sequence: Synthetic oligonucleotide"
atttcaatataagattcgg

SEQ ID NO: 1739 - DNA, 19 bp, Artificial Sequence
  source: /note="Description of Artificial Sequence: Synthetic oligonucleotide"
cttaagcaatcccgaactc

SEQ ID NO: 1740 - DNA, 19 bp, Artificial Sequence
  source: /note="Description of Artificial Sequence: Synthetic oligonucleotide"
ccttctttatcccctatcg

SEQ ID NO: 1741 - DNA, 19 bp, Artificial Sequence
  source: /note="Description of Artificial Sequence: Synthetic oligonucleotide"
aggccaaacctcggcttac

SEQ ID NO: 1742 - DNA, 19 bp, Artificial Sequence
  source: /note="Description of Artificial Sequence: Synthetic oligonucleotide"
ttcgaaaatttcaggtaag

SEQ ID NO: 1743 - DNA, 19 bp, Artificial Sequence
  source: /note="Description of Artificial Sequence: Synthetic oligonucleotide"
gcagaacaggagataacag

SEQ ID NO: 1744 - DNA, 19 bp, Artificial Sequence
  source: /note="Description of Artificial Sequence: Synthetic oligonucleotide"
gcggccctcgcccttctct

SEQ ID NO: 1745 - DNA, 19 bp, Artificial Sequence
  source: /note="Description of Artificial Sequence: Synthetic oligonucleotide"
tagtgatcgtggatacgag

SEQ ID NO: 1746 - DNA, 19 bp, Artificial Sequence
  source: /note="Description of Artificial Sequence: Synthetic oligonucleotide"
tacagccctcggtgtatat

SEQ ID NO: 1747 - DNA, 19 bp, Artificial Sequence
  source: /note="Description of Artificial Sequence: Synthetic oligonucleotide"
ggaaggaattaagcccgaa

SEQ ID NO: 1748 - DNA, 19 bp, Artificial Sequence
  source: /note="Description of Artificial Sequence: Synthetic oligonucleotide"
ggaacagctttcgtagttg

SEQ ID NO: 1749 - DNA, 19 bp, Artificial Sequence
  source: /note="Description of Artificial Sequence: Synthetic oligonucleotide"
ataaagtccagtgtcgatc

SEQ ID NO: 1750 - DNA, 19 bp, Artificial Sequence
  source: /note="Description of Artificial Sequence: Synthetic oligonucleotide"
aaaaccagagcttcggtca

SEQ ID NO: 1751 - DNA, 21 bp, Artificial Sequence
  source: /note="Description of Artificial Sequence: Synthetic oligonucleotide"
gagtcttctgggcaggcttaa

SEQ ID NO: 1752 - DNA, 21 bp, Artificial Sequence
  source: /note="Description of Artificial Sequence: Synthetic oligonucleotide"
tcgggtgagcatgtctttaat

SEQ ID NO: 1753 - DNA, 19 bp, Artificial Sequence
  source: /note="Description of Artificial Sequence: Synthetic oligonucleotide"
gtgtcaccagagtaacagt

SEQ ID NO: 1754 - DNA, 19 bp, Artificial Sequence
  source: /note="Description of Artificial Sequence: Synthetic oligonucleotide"
tgatcatcaagcagaaggt

SEQ ID NO: 1755 - DNA, 20 bp, Artificial Sequence
  source: /note="Description of Artificial Sequence: Synthetic oligonucleotide"
aacttcgaaaatttcaggta

SEQ ID NO: 1756 - DNA, 20 bp, Artificial Sequence
  source: /note="Description of Artificial Sequence: Synthetic oligonucleotide"
gaaactcatcaaatatgcgt

SEQ ID NO: 1757 - DNA, 20 bp, Artificial Sequence
  source: /note="Description of Artificial Sequence: Synthetic oligonucleotide"
tcatttacactaacacgcat

SEQ ID NO: 1758 - DNA, 20 bp, Artificial Sequence
  source: /note="Description of Artificial Sequence: Synthetic oligonucleotide"
gaatgaaactcatcaaatat

SEQ ID NO: 1759 - DNA, 20 bp, Artificial Sequence
  source: /note="Description of Artificial Sequence: Synthetic oligonucleotide"
tcatcaatatctttgaagga

SEQ ID NO: 1760 - DNA, 20 bp, Artificial Sequence
  source: /note="Description of Artificial Sequence: Synthetic oligonucleotide"
tgttttcataggaaaaatag

SEQ ID NO: 1761 - DNA, 20 bp, Artificial Sequence
  source: /note="Description of Artificial Sequence: Synthetic oligonucleotide"
aattggaaaatgtgatggga

SEQ ID NO: 1762 - DNA, 20 bp, Artificial Sequence
  source: /note="Description of Artificial Sequence: Synthetic oligonucleotide"
atgatcatcaagcagaaggt

SEQ ID NO: 1763 - DNA, 20 bp, Artificial Sequence
  source: /note="Description of Artificial Sequence: Synthetic oligonucleotide"
agatgatcatcaagcagaag

SEQ ID NO: 1764 - DNA, 20 bp, Artificial Sequence
  source: /note="Description of Artificial Sequence: Synthetic oligonucleotide"
cattttttctcataccttct

SEQ ID NO: 1765 - DNA, 20 bp, Artificial Sequence
  source: /note="Description of Artificial Sequence: Synthetic oligonucleotide"
tcctactcagactgttactc

SEQ ID NO: 1766 - DNA, 20 bp, Artificial Sequence
  source: /note="Description of Artificial Sequence: Synthetic oligonucleotide"
acaggttgtgtcaccagagt

SEQ ID NO: 1767 - DNA, 20 bp, Artificial Sequence
  source: /note="Description of Artificial Sequence: Synthetic oligonucleotide"
ttatcattttttctcatacc

SEQ ID NO: 1768 - DNA, 20 bp, Artificial Sequence
  source: /note="Description of Artificial Sequence: Synthetic oligonucleotide"
ttgcctaagaactggtggga

SEQ ID NO: 1769 - DNA, 20 bp, Artificial Sequence
  source: /note="Description of Artificial Sequence: Synthetic oligonucleotide"
aaacagttgcctaagaactg

SEQ ID NO: 1770 - DNA, 20 bp, Artificial Sequence
  source: /note="Description of Artificial Sequence: Synthetic oligonucleotide"
tttcccaccagttcttaggc

SEQ ID NO: 1771 - DNA, 20 bp, Artificial Sequence
  source: /note="Description of Artificial Sequence: Synthetic oligonucleotide"
tggctttgatttccctaggg

SEQ ID NO: 1772 - DNA, 20 bp, Artificial Sequence
  source: /note="Description of Artificial Sequence: Synthetic oligonucleotide"
tagggaaatcaaagccaatg

SEQ ID NO: 1773 - DNA, 20 bp, Artificial Sequence
  source: /note="Description of Artificial Sequence: Synthetic oligonucleotide"
gaccctagggaaatcaaagc

SEQ ID NO: 1774 - DNA, 20 bp, Artificial Sequence
  source: /note="Description of Artificial Sequence: Synthetic oligonucleotide"
tgagggctccaccctcacga

SEQ ID NO: 1775 - DNA, 20 bp, Artificial Sequence
  source: /note="Description of Artificial Sequence: Synthetic oligonucleotide"
aaggattgagggctccaccc

SEQ ID NO: 1776 - DNA, 20 bp, Artificial Sequence
  source: /note="Description of Artificial Sequence: Synthetic oligonucleotide"
gctccaccctcacgagtggg

SEQ ID NO: 1777 - DNA, 20 bp, Artificial Sequence
  source: /note="Description of Artificial Sequence: Synthetic oligonucleotide"
tatcccctatcgaggaaacc

SEQ ID NO: 1778 - DNA, 20 bp, Artificial Sequence
  source: /note="Description of Artificial Sequence: Synthetic oligonucleotide"
gataaagaaggcctatttca

SEQ ID NO: 1779 - DNA, 20 bp, Artificial Sequence
  source: /note="Description of Artificial Sequence: Synthetic oligonucleotide"
aggccttctttatcccctat

SEQ ID NO: 1780 - DNA, 20 bp, Artificial Sequence
  source: /note="Description of Artificial Sequence: Synthetic oligonucleotide"
tgagggctccaccctcacga

SEQ ID NO: 1781 - DNA, 20 bp, Artificial Sequence
  source: /note="Description of Artificial Sequence: Synthetic oligonucleotide"
gataaagaaggcctatttca

SEQ ID NO: 1782 - RNA, 20 nt, Artificial Sequence
  source: /note="Description of Artificial Sequence: Synthetic oligonucleotide"
uagaagaucugagcucugag

SEQ ID NO: 1783 - RNA, 20 nt, Artificial Sequence
  source: /note="Description of Artificial Sequence: Synthetic oligonucleotide"
agaucugagcucugagugga

SEQ ID NO: 1784 - RNA, 20 nt, Artificial Sequence
  source: /note="Description of Artificial Sequence: Synthetic oligonucleotide"
ucugagcucugaguggaagg

SEQ ID NO: 1785 - RNA, 20 nt, Artificial Sequence
  source: /note="Description of Artificial Sequence: Synthetic oligonucleotide"
ccguuuacuucaagagcuga

SEQ ID NO: 1786 - RNA, 20 nt, Artificial Sequence
  source: /note="Description of Artificial Sequence: Synthetic oligonucleotide"
aagcagccugaccuagcucc

SEQ ID NO: 1787 - RNA, 20 nt, Artificial Sequence
  source: /note="Description of Artificial Sequence: Synthetic oligonucleotide"
gcuccuggacugaccacuau

SEQ ID NO: 1788 - RNA, 20 nt, Artificial Sequence
  source: /note="Description of Artificial Sequence: Synthetic oligonucleotide"
cccucagcucuugaaguaaa

SEQ ID NO: 1789 - RNA, 20 nt, Artificial Sequence
  source: /note="Description of Artificial Sequence: Synthetic oligonucleotide"
gucaguccaggagcuagguc

SEQ ID NO: 1790 - RNA, 20 nt, Artificial Sequence
  source: /note="Description of Artificial Sequence: Synthetic oligonucleotide"
uaguggucaguccaggagcu

SEQ ID NO: 1791 - RNA, 20 nt, Artificial Sequence
  source: /note="Description of Artificial Sequence: Synthetic oligonucleotide"
gcuccaauaguggucagucc

SEQ ID NO: 1792 - RNA, 20 nt, Artificial Sequence
  source: /note="Description of Artificial Sequence: Synthetic oligonucleotide"
uggccaaagaccuccgccag

SEQ ID NO: 1793 - RNA, 20 nt, Artificial Sequence
  source: /note="Description of Artificial Sequence: Synthetic oligonucleotide"
guggcagacaaauguagaug

SEQ ID NO: 1794 - RNA, 20 nt, Artificial Sequence
  source: /note="Description of Artificial Sequence: Synthetic oligonucleotide"
uguagauguggcaaaugacu

SEQ ID NO: 1795 - RNA, 20 nt, Artificial Sequence
  source: /note="Description of Artificial Sequence: Synthetic oligonucleotide"
cuuggcccugaaacuucucc

SEQ ID NO: 1796 - RNA, 20 nt, Artificial Sequence
  source: /note="Description of Artificial Sequence: Synthetic oligonucleotide"
cagagaauaucaaugccucu

SEQ ID NO: 1797 - RNA, 20 nt, Artificial Sequence
  source: /note="Description of Artificial Sequence: Synthetic oligonucleotide"
cagagaauaucaaugccucu

SEQ ID NO: 1798 - RNA, 20 nt, Artificial Sequence
  source: /note="Description of Artificial Sequence: Synthetic oligonucleotide"
cauuugucugccacuggcgg

SEQ ID NO: 1799 - RNA, 20 nt, Artificial Sequence
  source: /note="Description of Artificial Sequence: Synthetic oligonucleotide"
cuacauuugucugccacugg

SEQ ID NO: 1800 - RNA, 20 nt, Artificial Sequence
  source: /note="Description of Artificial Sequence: Synthetic oligonucleotide"
caucuacauuugucugccac

SEQ ID NO: 1801 - RNA, 20 nt, Artificial Sequence
  source: /note="Description of Artificial Sequence: Synthetic oligonucleotide"
auaaucccggagaaguuuca

SEQ ID NO: 1802 - RNA, 20 nt, Artificial Sequence
  source: /note="Description of Artificial Sequence: Synthetic oligonucleotide"
uaucaucugcagaauaaucc

SEQ ID NO: 1803 - RNA, 20 nt, Artificial Sequence
  source: /note="Description of Artificial Sequence: Synthetic oligonucleotide"
uguuaucauguggacuuuuc

SEQ ID NO: 1804 - RNA, 20 nt, Artificial Sequence
  source: /note="Description of Artificial Sequence: Synthetic oligonucleotide"
ugauauaucauuucucugug

SEQ ID NO: 1805 - RNA, 20 nt, Artificial Sequence
  source: /note="Description of Artificial Sequence: Synthetic oligonucleotide"
uuuaugaaugcuucuccaag

SEQ ID NO: 1806 - RNA, 21 nt, Artificial Sequence
  source: /note="Description of Artificial Sequence: Synthetic oligonucleotide"
uucuccaggcuagaagaacaa

SEQ ID NO: 1807 - RNA, 21 nt, Artificial Sequence
  source: /note="Description of Artificial Sequence: Synthetic oligonucleotide"
cugcucuuuuccagguucaag

SEQ ID NO: 1808 - RNA, 21 nt, Artificial Sequence
  source: /note="Description of Artificial Sequence: Synthetic oligonucleotide"
gucuguuucaguuacuggugg

SEQ ID NO: 1809 - RNA, 21 nt, Artificial Sequence
  source: /note="Description of Artificial Sequence: Synthetic oligonucleotide"
uccaguuucauuuaauuguuu

SEQ ID NO: 1810 - RNA, 21 nt, Artificial Sequence
  source: /note="Description of Artificial Sequence: Synthetic oligonucleotide"
cuuaugggagcacuuacaagc

SEQ ID NO: 1811 - RNA, 21 nt, Artificial Sequence
  source: /note="Description of Artificial Sequence: Synthetic oligonucleotide"
uugcuucauuaccuucacugg

SEQ ID NO: 1812 - RNA, 21 nt, Artificial Sequence
  source: /note="Description of Artificial Sequence: Synthetic oligonucleotide"
uugugucaccagaguaacagu

SEQ ID NO: 1813 - RNA, 21 nt, Artificial Sequence
  source: /note="Description of Artificial Sequence: Synthetic oligonucleotide"
aguaaccacagguugugucac

SEQ ID NO: 1814 - RNA, 21 nt, Artificial Sequence
  source: /note="Description of Artificial Sequence: Synthetic oligonucleotide"
uucaaauuuugggcagcggua

SEQ ID NO: 1815 - RNA, 21 nt, Artificial Sequence
  source: /note="Description of Artificial Sequence: Synthetic oligonucleotide"
caagaggcuagaacaaucauu

SEQ ID NO: 1816 - RNA, 21 nt, Artificial Sequence
  source: /note="Description of Artificial Sequence: Synthetic oligonucleotide"
uuguacuucaucccacugauu

SEQ ID NO: 1817 - RNA, 21 nt, Artificial Sequence
  source: /note="Description of Artificial Sequence: Synthetic oligonucleotide"
cuucagaaccggaggcaacag

SEQ ID NO: 1818 - RNA, 21 nt, Artificial Sequence
  source: /note="Description of Artificial Sequence: Synthetic oligonucleotide"
caacaguugaaugaaauguua

SEQ ID NO: 1819 - RNA, 21 nt, Artificial Sequence
  source: /note="Description of Artificial Sequence: Synthetic oligonucleotide"
gccaagcuugagucauggaag

SEQ ID NO: 1820 - RNA, 21 nt, Artificial Sequence
  source: /note="Description of Artificial Sequence: Synthetic oligonucleotide"
cuugguuucugugauuuucuu

SEQ ID NO: 1821 - RNA, 21 nt, Artificial Sequence
  source: /note="Description of Artificial Sequence: Synthetic oligonucleotide"
ucauuucacaggccuucaaga

SEQ ID NO: 1822 - RNA, 21 nt, Artificial Sequence
  source: /note="Description of Artificial Sequence: Synthetic oligonucleotide"
cagaaauauucguacagucuc

SEQ ID NO: 1823 - RNA, 21 nt, Artificial Sequence
  source: /note="Description of Artificial Sequence: Synthetic oligonucleotide"
caauuaccucugggcuccugg

SEQ ID NO: 1824 - DNA, 20 bp, Artificial Sequence
  source: /note="Description of Artificial Sequence: Synthetic oligonucleotide"
gatactagggtggcaaatag

SEQ ID NO: 1825 - DNA, 20 bp, Artificial Sequence
  source: /note="Description of Artificial Sequence: Synthetic oligonucleotide"
gtgttcttaaaagaatggtg

SEQ ID NO: 1826 - DNA, 20 bp, Artificial Sequence
  source: /note="Description of Artificial Sequence: Synthetic oligonucleotide"
gtcaagaacagctgcagaac

SEQ ID NO: 1827 - DNA, 20 bp, Artificial Sequence
  source: /note="Description of Artificial Sequence: Synthetic oligonucleotide"
gcagttgaatgaaatgttaa

SEQ ID NO: 1828 - DNA, 20 bp, Artificial Sequence
  source: /note="Description of Artificial Sequence: Synthetic oligonucleotide"
gatactagtgtggctcatag

SEQ ID NO: 1829 - DNA, 20 bp, Artificial Sequence
  source: /note="Description of Artificial Sequence: Synthetic oligonucleotide"
gatacgatggtggcaaatcg

SEQ ID NO: 1830 - DNA, 20 bp, Artificial Sequence
  source: /note="Description of Artificial Sequence: Synthetic oligonucleotide"
gatactagggtggggaataa

SEQ ID NO: 1831 - DNA, 20 bp, Artificial Sequence
  source: /note="Description of Artificial Sequence: Synthetic oligonucleotide"
tttttcttaaaagaatggta

SEQ ID NO: 1832 - DNA, 20 bp, Artificial Sequence
  source: /note="Description of Artificial Sequence: Synthetic oligonucleotide"
ttgatcttagaagaatggtg

SEQ ID NO: 1833 - DNA, 20 bp, Artificial Sequence
  source: /note="Description of Artificial Sequence: Synthetic oligonucleotide"
gttttcttgaaaaaatggtg

SEQ ID NO: 1834 - DNA, 20 bp, Artificial Sequence
  source: /note="Description of Artificial Sequence: Synthetic oligonucleotide"
ctgttcttaaaaggttggtg

SEQ ID NO: 1835 - DNA, 20 bp, Artificial Sequence
  source: /note="Description of Artificial Sequence: Synthetic oligonucleotide"
gagttcttcaaagaatagtg

SEQ ID NO: 1836 - DNA, 19 bp, Artificial Sequence
  source: /note="Description of Artificial Sequence: Synthetic oligonucleotide"
tctagggcagctgcagaac

SEQ ID NO: 1837 - DNA, 19 bp, Artificial Sequence
  source: /note="Description of Artificial Sequence: Synthetic oligonucleotide"
tcattcacagctgcagaac

SEQ ID NO: 1838 - DNA, 19 bp, Artificial Sequence
  source: /note="Description of Artificial Sequence: Synthetic oligonucleotide"
caaagaatagctgcagaac

SEQ ID NO: 1839 - DNA, 19 bp, Artificial Sequence
  source: /note="Description of Artificial Sequence: Synthetic oligonucleotide"
tcaagaacagctgcagcag

SEQ ID NO: 1840 - DNA, 19 bp, Artificial Sequence
  source: /note="Description of Artificial Sequence: Synthetic oligonucleotide"
tcaagaacagctgcatcac

SEQ ID NO: 1841 - DNA, 19 bp, Artificial Sequence
  source: /note="Description of Artificial Sequence: Synthetic oligonucleotide"
cagttacatgaaatgttaa

SEQ ID NO: 1842 - DNA, 19 bp, Artificial Sequence
  source: /note="Description of Artificial Sequence: Synthetic oligonucleotide"
cattttaatgaaatgttaa

SEQ ID NO: 1843 - DNA, 19 bp, Artificial Sequence
  source: /note="Description of Artificial Sequence: Synthetic oligonucleotide"
aagttgaatgaaattttaa

SEQ ID NO: 1844 - DNA, 19 bp, Artificial Sequence
  source: /note="Description of Artificial Sequence: Synthetic oligonucleotide"
cagtggaataaaatgttaa

SEQ ID NO: 1845 - DNA, 22 bp, Artificial Sequence
  source: /note="Description of Artificial Sequence: Synthetic oligonucleotide"
aaagatatataatgtcatgaat

SEQ ID NO: 1846 - DNA, 22 bp, Artificial Sequence
  source: /note="Description of Artificial Sequence: Synthetic oligonucleotide"
gcagaatcaaatataatagtct

SEQ ID NO: 1847 - DNA, 20 bp, Artificial Sequence
  source: /note="Description of Artificial Sequence: Synthetic oligonucleotide"
aacaaatatcccttagtatc

SEQ ID NO: 1848 - DNA, 20 bp, Artificial Sequence
  source: /note="Description of Artificial Sequence: Synthetic oligonucleotide"
aatgtatttcttctattcaa

SEQ ID NO: 1849 - DNA, 22 bp, Artificial Sequence
  source: /note="Description of Artificial Sequence: Synthetic oligonucleotide"
aacaataagtcaaatttaattg

SEQ ID NO: 1850 - DNA, 22 bp, Artificial Sequence
  source: /note="Description of Artificial Sequence: Synthetic oligonucleotide"
gaactggtgggaaatggtctag

SEQ ID NO: 1851 - DNA, 22 bp, Artificial Sequence
  source: /note="Description of Artificial Sequence: Synthetic oligonucleotide"
tcctttggtaaataaaagtcct

SEQ ID NO: 1852 - DNA, 22 bp, Artificial Sequence
  source: /note="Description of Artificial Sequence: Synthetic oligonucleotide"
taggaatcaaatggacttggat

SEQ ID NO: 1853 - DNA, 22 bp, Artificial Sequence
  source: /note="Description of Artificial Sequence: Synthetic oligonucleotide"
taattctttctagaaagagcct

SEQ ID NO: 1854 - DNA, 22 bp, Artificial Sequence
  source: /note="Description of Artificial Sequence: Synthetic oligonucleotide"
ctcttgcatcttgcacatgtcc

SEQ ID NO: 1855 - DNA, 22 bp, Artificial Sequence
  source: /note="Description of Artificial Sequence: Synthetic oligonucleotide"
acttagaggtcttctacataca

SEQ ID NO: 1856 - DNA, 22 bp, Artificial Sequence
  source: /note="Description of Artificial Sequence: Synthetic oligonucleotide"
tcagaggtgagtggtgagggga

SEQ ID NO: 1857 - DNA, 22 bp, Artificial Sequence
  source: /note="Description of Artificial Sequence: Synthetic oligonucleotide"
acacacagctgggttatcagag

SEQ ID NO: 1858 - DNA, 19 bp, Artificial Sequence
  source: /note="Description of Artificial Sequence: Synthetic oligonucleotide"
cacagctgggttatcagag

SEQ ID NO: 1859 - DNA, 20 bp, Artificial Sequence
  source: /note="Description of Artificial Sequence: Synthetic oligonucleotide"
acacagctgggttatcagag

SEQ ID NO: 1860 - DNA, 21 bp, Artificial Sequence
  source: /note="Description of Artificial Sequence: Synthetic oligonucleotide"
cacacagctgggttatcagag

SEQ ID NO: 1861 - DNA, 23 bp, Artificial Sequence
  source: /note="Description of Artificial Sequence: Synthetic oligonucleotide"
aacacacagctgggttatcagag

SEQ ID NO: 1862 - DNA, 19 bp, Artificial Sequence
  source: /note="Description of Artificial Sequence: Synthetic oligonucleotide"
ctgstgggaratggtctag

SEQ ID NO: 1863 - DNA, 20 bp, Artificial Sequence
  source: /note="Description of Artificial Sequence: Synthetic oligonucleotide"
actggtgggaaatggtctag

SEQ ID NO: 1864 - DNA, 21 bp, Artificial Sequence
  source: /note="Description of Artificial Sequence: Synthetic oligonucleotide"
aactggtgggaaatggtctag

SEQ ID NO: 1865 - DNA, 23 bp, Artificial Sequence
  source: /note="Description of Artificial Sequence: Synthetic oligonucleotide"
agaactggtgggaaatggtctag

SEQ ID NO: 1866 - DNA, 20 bp, Artificial Sequence
  source: /note="Description of Artificial Sequence: Synthetic oligonucleotide"
atatcttcttaaatacccga

SEQ ID NO: 1867 - DNA, 20 bp, Artificial Sequence
  source: /note="Description of Artificial Sequence: Synthetic oligonucleotide"
agtctcacaaaactgcagag

SEQ ID NO: 1868 - DNA, 20 bp, Artificial Sequence
  source: /note="Description of Artificial Sequence: Synthetic oligonucleotide"
tacttatgtattttaaaaac

SEQ ID NO: 1869 - DNA, 22 bp, Artificial Sequence
  source: /note="Description of Artificial Sequence: Synthetic oligonucleotide"
gaataatttctattatattaca

SEQ ID NO: 1870 - DNA, 22 bp, Artificial Sequence
  source: /note="Description of Artificial Sequence: Synthetic oligonucleotide"
ttcgaaaatttcaggtaagccg

SEQ ID NO: 1871 - DNA, 22 bp, Artificial Sequence
  source: /note="Description of Artificial Sequence: Synthetic oligonucleotide"
tcatttctaaaagtcttttgcc

SEQ ID NO: 1872 - DNA, 22 bp, Artificial Sequence
  source: /note="Description of Artificial Sequence: Synthetic oligonucleotide"
tttgagacacagtataggttat

SEQ ID NO: 1873 - DNA, 20 bp, Artificial Sequence
  source: /note="Description of Artificial Sequence: Synthetic oligonucleotide"
atataatagaaattattcat

SEQ ID NO: 1874 - DNA, 20 bp, Artificial Sequence
  source: /note="Description of Artificial Sequence: Synthetic oligonucleotide"
taatatgccctgtaatataa

SEQ ID NO: 1875 - DNA, 20 bp, Artificial Sequence
  source: /note="Description of Artificial Sequence: Synthetic oligonucleotide"
tgatatcatcaatatctttg

SEQ ID NO: 1876 - DNA, 20 bp, Artificial Sequence
  source: /note="Description of Artificial Sequence: Synthetic oligonucleotide"
gcaattaattggaaaatgtg

SEQ ID NO: 1877 - DNA, 21 bp, Artificial Sequence
  source: /note="Description of Artificial Sequence: Synthetic oligonucleotide"
ctttaagcttaggtaaaatca

SEQ ID NO: 1878 - DNA, 20 bp, Artificial Sequence
  source: /note="Description of Artificial Sequence: Synthetic oligonucleotide"
cagtaatgtgtcataccttc

SEQ ID NO: 1879 - DNA, 20 bp, Artificial Sequence
  source: /note="Description of Artificial Sequence: Synthetic oligonucleotide"
cagggcatattatatttaga

SEQ ID NO: 1880 - DNA, 20 bp, Artificial Sequence
  source: /note="Description of Artificial Sequence: Synthetic oligonucleotide"
caaaagccaaatctatttca

SEQ ID NO: 1881 - DNA, 26 bp, Artificial Sequence
  source: /note="Description of Artificial Sequence: Synthetic oligonucleotide"
atgctttggtgggaagaagtagagga

SEQ ID NO: 1882 - DNA, 26 bp, Artificial Sequence
  source: /note="Description of Artificial Sequence: Synthetic oligonucleotide"
atgctttggtgggaagaatagaggac

SEQ ID NO: 1883 - DNA, 23 bp, Artificial Sequence
  source: /note="Description of Artificial Sequence: Synthetic oligonucleotide"
ttgtgacaagctcactaattagg

SEQ ID NO: 1884 - DNA, 23 bp, Artificial Sequence
  source: /note="Description of Artificial Sequence: Synthetic oligonucleotide"
aagtttgaagaacttttaccagg

SEQ ID NO: 1885 - DNA, 23 bp, Artificial Sequence
  source: /note="Description of Artificial Sequence: Synthetic oligonucleotide"
aggcagcgataaaaaaaacctgg

SEQ ID NO: 1886 - DNA, 23 bp, Artificial Sequence
  source: /note="Description of Artificial Sequence: Synthetic oligonucleotide"
gctttggtgggaagaagtagagg

SEQ ID NO: 1887 - DNA, 19 bp, Artificial Sequence
  source: /note="Description of Artificial Sequence: Synthetic oligonucleotide"
gctgggtgtcccattgaaa

SEQ ID NO: 1888 - DNA, 19 bp, Artificial Sequence
  source: /note="Description of Artificial Sequence: Synthetic oligonucleotide"
cagccgctcgctgcagcag

SEQ ID NO: 1889 - DNA, 19 bp, Artificial Sequence
  source: /note="Description of Artificial Sequence: Synthetic oligonucleotide"
tggagagtttgcaaggagc

SEQ ID NO: 1890 - DNA, 19 bp, Artificial Sequence
  source: /note="Description of Artificial Sequence: Synthetic oligonucleotide"
gtttattcagccgggagtc

SEQ ID NO: 1891 - DNA, 20 bp, Artificial Sequence
  source: /note="Description of Artificial Sequence: Synthetic oligonucleotide"
cgccaggaggggtgggtcta

SEQ ID NO: 1892 - DNA, 19 bp, Artificial Sequence
  source: /note="Description of Artificial Sequence: Synthetic oligonucleotide"
ccttggtgagactggtaga

SEQ ID NO: 1893 - DNA, 19 bp, Artificial Sequence
  source: /note="Description of Artificial Sequence: Synthetic oligonucleotide"
gtcttcaggttctgttgct

SEQ ID NO: 1894 - DNA, 19 bp, Artificial Sequence
  source: /note="Description of Artificial Sequence: Synthetic oligonucleotide"
atattcctgatttaaaagt

SEQ ID NO: 1895 - DNA, 19 bp, Artificial Sequence
  source: /note="Description of Artificial Sequence: Synthetic oligonucleotide"
ttaaaagtcggctggtagc

SEQ ID NO: 1896 - DNA, 19 bp, Artificial Sequence
  source: /note="Description of Artificial Sequence: Synthetic oligonucleotide"
cgggccgggggcggggtcc

SEQ ID NO: 1897 - DNA, 19 bp, Artificial Sequence
  source: /note="Description of Artificial Sequence: Synthetic oligonucleotide"
gcccgagccgcgtgtggaa

SEQ ID NO: 1898 - DNA, 19 bp, Artificial Sequence
  source: /note="Description of Artificial Sequence: Synthetic oligonucleotide"
ccttcattgcggcgggctg

SEQ ID NO: 1899 - DNA, 19 bp, Artificial Sequence
  source: /note="Description of Artificial Sequence: Synthetic oligonucleotide"
ccgacccctcccgggtccc

SEQ ID NO: 1900 - DNA, 19 bp, Artificial Sequence
  source: /note="Description of Artificial Sequence: Synthetic oligonucleotide"
caggaccgcgcttcccacg

SEQ ID NO: 1901 - DNA, 19 bp, Artificial Sequence
  source: /note="Description of Artificial Sequence: Synthetic oligonucleotide"
tgcaccctgggagcgcgag

SEQ ID NO: 1902 - DNA, 19 bp, Artificial Sequence
  source: /note="Description of Artificial Sequence: Synthetic oligonucleotide"
ccgcacgcacctgttccca

SEQ ID NO: 1903 - DNA, 19 bp, Artificial Sequence
  source: /note="Description of Artificial Sequence: Synthetic oligonucleotide"
aaaacagcgagggagaaac

SEQ ID NO: 1904 - DNA, 19 bp, Artificial Sequence
  source: /note="Description of Artificial Sequence: Synthetic oligonucleotide"
ttaacttgattgtgaaatc

SEQ ID NO: 1905 - DNA, 19 bp, Artificial Sequence
  source: /note="Description of Artificial Sequence: Synthetic oligonucleotide"
aaaacaatgcatatttgca

SEQ ID NO: 1906 - DNA, 19 bp, Artificial Sequence
  source: /note="Description of Artificial Sequence: Synthetic oligonucleotide"
aaaatccagtattttaatg

SEQ ID NO: 1907 - DNA, 19 bp, Artificial Sequence
  source: /note="Description of Artificial Sequence: Synthetic oligonucleotide"
acccagcactgcagcctgg

SEQ ID NO: 1908 - DNA, 19 bp, Artificial Sequence
  source: /note="Description of Artificial Sequence: Synthetic oligonucleotide"
aacttatgcggcgtttcct

SEQ ID NO: 1909 - DNA, 19 bp, Artificial Sequence
  source: /note="Description of Artificial Sequence: Synthetic oligonucleotide"
tcactttaaaaccacctct

SEQ ID NO: 1910 - DNA, 19 bp, Artificial Sequence
  source: /note="Description of Artificial Sequence: Synthetic oligonucleotide"
gcatctttttctctttaat

SEQ ID NO: 1911 - DNA, 19 bp, Artificial Sequence
  source: /note="Description of Artificial Sequence: Synthetic oligonucleotide"
tgtactctctgaggtgctc

SEQ ID NO: 1912 - DNA, 19 bp, Artificial Sequence
  source: /note="Description of Artificial Sequence: Synthetic oligonucleotide"
acgcagataagaaccagtt

SEQ ID NO: 1913 - DNA, 19 bp, Artificial Sequence
  source: /note="Description of Artificial Sequence: Synthetic oligonucleotide"
catcaagtcagccatcagc

SEQ ID NO: 1914 - DNA, 19 bp, Artificial Sequence
  source: /note="Description of Artificial Sequence: Synthetic oligonucleotide"
gagtcaccctcctggaaac

SEQ ID NO: 1915 - DNA, 19 bp, Artificial Sequence
  source: /note="Description of Artificial Sequence: Synthetic oligonucleotide"
gctagggatgaagaataaa

SEQ ID NO: 1916 - DNA, 19 bp, Artificial Sequence
  source: /note="Description of Artificial Sequence: Synthetic oligonucleotide"
ttgaccaatagccttgaca

SEQ ID NO: 1917 - DNA, 19 bp, Artificial Sequence
  source: /note="Description of Artificial Sequence: Synthetic oligonucleotide"
tgcaaatatctgtctgaaa

SEQ ID NO: 1918 - DNA, 19 bp, Artificial Sequence
  source: /note="Description of Artificial Sequence: Synthetic oligonucleotide"
aaattagcagtatcctctt

SEQ ID NO: 1919 - DNA, 19 bp, Artificial Sequence
  source: /note="Description of Artificial Sequence: Synthetic oligonucleotide"
cctgggctccggggcgttt

SEQ ID NO: 1920 - DNA, 19 bp, Artificial Sequence
  source: /note="Description of Artificial Sequence: Synthetic oligonucleotide"
ggcccctgcggccaccccg

SEQ ID NO: 1921 - DNA, 19 bp, Artificial Sequence
  source: /note="Description of Artificial Sequence: Synthetic oligonucleotide"
ctccctccctgcccggtag

SEQ ID NO: 1922 - DNA, 19 bp, Artificial Sequence
  source: /note="Description of Artificial Sequence: Synthetic oligonucleotide"
aggtttggaaagggcgtgc

SEQ ID NO: 1923 - DNA, 20 bp, Artificial Sequence
  source: /note="Description of Artificial Sequence: Synthetic oligonucleotide"
gattggctttgatttcccta

SEQ ID NO: 1924 - DNA, 23 bp, Artificial Sequence
  source: /note="Description of Artificial Sequence: Synthetic oligonucleotide"
gtgtagagtaagtcagcctatgg

SEQ ID NO: 1925 - DNA, 20 bp, Artificial Sequence
  source: /note="Description of Artificial Sequence: Synthetic oligonucleotide"
gcctactcagactgttactc

SEQ ID NO: 1926 - DNA, 23 bp, Artificial Sequence
  source: /note="Description of Artificial Sequence: Synthetic oligonucleotide"
gttggacagaacttaccgactgg

SEQ ID NO: 1927 - DNA, 20 bp, Artificial Sequence
  source: /note="Description of Artificial Sequence: Synthetic oligonucleotide"
gcagttgcctaagaactggt

SEQ ID NO: 1928 - DNA, 20 bp, Artificial Sequence
  source: /note="Description of Artificial Sequence: Synthetic oligonucleotide"
ggggctccaccctcacgagt

SEQ ID NO: 1929 - DNA, 23 bp, Artificial Sequence
  source: /note="Description of Artificial Sequence: Synthetic oligonucleotide"
gtttgcttcgctataaaacgagg

SEQ ID NO: 1930 - DNA, 23 bp, Artificial Sequence
  source: /note="Description of Artificial Sequence: Synthetic oligonucleotide"
gtctgaggatggggccgcaatgg

SEQ ID NO: 1931 - DNA, 23 bp, Artificial Sequence
  source: /note="Description of Artificial Sequence: Synthetic oligonucleotide"
ggatctgtcaaatcgcctgcagg

SEQ ID NO: 1932 - DNA, 23 bp, Artificial Sequence
  source: /note="Description of Artificial Sequence: Synthetic oligonucleotide"
gccaggatggcattgggcagcgg

SEQ ID NO: 1933 - DNA, 23 bp, Artificial Sequence
  source: /note="Description of Artificial Sequence: Synthetic oligonucleotide"
gctgaatctgcggtggcaggagg

SEQ ID NO: 1934 - DNA, 23 bp, Artificial Sequence
  source: /note="Description of Artificial Sequence: Synthetic oligonucleotide"
gttcttttgttcttctagcctgg

SEQ ID NO: 1935 - DNA, 23 bp, Artificial Sequence
  source: /note="Description of Artificial Sequence: Synthetic oligonucleotide"
ggaaaagcttgagcaagtcaagg

SEQ ID NO: 1936 - DNA, 23 bp, Artificial Sequence
  source: /note="Description of Artificial Sequence: Synthetic oligonucleotide"
ggaagagttgcccctgcgccagg

SEQ ID NO: 1937 - DNA, 23 bp, Artificial Sequence
  source: /note="Description of Artificial Sequence: Synthetic oligonucleotide"
gacaaatctccagtggataaagg

SEQ ID NO: 1938 - DNA, 23 bp, Artificial Sequence
  source: /note="Description of Artificial Sequence: Synthetic oligonucleotide"
gtgtttctcaggtaaagctctgg

SEQ ID NO: 1939 - DNA, 23 bp, Artificial Sequence
  source: /note="Description of Artificial Sequence: Synthetic oligonucleotide"
ggaaggaccatttgacgttaagg

SEQ ID NO: 1940 - DNA, 23 bp, Artificial Sequence
  source: /note="Description of Artificial Sequence: Synthetic oligonucleotide"
gaactgctatttcagtttcctgg

SEQ ID NO: 1941 - DNA, 23 bp, Artificial Sequence
  source: /note="Description of Artificial Sequence: Synthetic oligonucleotide"
gccagccactcagccagtgaagg

SEQ ID NO: 1942 - DNA, 23 bp, Artificial Sequence
  source: /note="Description of Artificial Sequence: Synthetic oligonucleotide"
ggtatgcttttctgttaaagagg

SEQ ID NO: 1943 - DNA, 23 bp, Artificial Sequence
  source: /note="Description of Artificial Sequence: Synthetic oligonucleotide"
gctcctggactgaccactattgg

SEQ ID NO: 1944 - DNA, 23 bp, Artificial Sequence
  source: /note="Description of Artificial Sequence: Synthetic oligonucleotide"
ggaacagaggcgtccccagttgg

SEQ ID NO: 1945 - DNA, 23 bp, Artificial Sequence
  source: /note="Description of Artificial Sequence: Synthetic oligonucleotide"
ggaggctagaacaatcattacgg

SEQ ID NO: 1946 - DNA, 23 bp, Artificial Sequence
  source: /note="Description of Artificial Sequence: Synthetic oligonucleotide"
gacaagaacaccttcagaaccgg

SEQ ID NO: 1947 - DNA, 23 bp, Artificial Sequence
  source: /note="Description of Artificial Sequence: Synthetic oligonucleotide"
gggtttctgtgattttcttttgg

SEQ ID NO: 1948 - DNA, 23 bp, Artificial Sequence
  source: /note="Description of Artificial Sequence: Synthetic oligonucleotide"
gggccaaagacctccgccagtgg

SEQ ID NO: 1949 - DNA, 23 bp, Artificial Sequence
  source: /note="Description of Artificial Sequence: Synthetic oligonucleotide"
gttggagaagcattcataaaagg

SEQ ID NO: 1950 - DNA, 23 bp, Artificial Sequence
  source: /note="Description of Artificial Sequence: Synthetic oligonucleotide"
gtcgctcactcaccctgcaaagg

SEQ ID NO: 1951 - DNA, 23 bp, Artificial Sequence
  source: /note="Description of Artificial Sequence: Synthetic oligonucleotide"
gaaaagagctgatgaaacaatgg

SEQ ID NO: 1952 - DNA, 23 bp, Artificial Sequence
  source: /note="Description of Artificial Sequence: Synthetic oligonucleotide"
gtacacttttcaaaatgctttgg

SEQ ID NO: 1953 - DNA, 23 bp, Artificial Sequence
  source: /note="Description of Artificial Sequence: Synthetic oligonucleotide"
ggagatgatcatcaagcagaagg

SEQ ID NO: 1954 - DNA, 23 bp, Artificial Sequence
  source: /note="Description of Artificial Sequence: Synthetic oligonucleotide"
gctttgaaagagcaataaaatgg

SEQ ID NO: 1955 - DNA, 23 bp, Artificial Sequence
  source: /note="Description of Artificial Sequence: Synthetic oligonucleotide"
gcacaaaagtcaaatcggaatgg

SEQ ID NO: 1956 - DNA, 23 bp, Artificial Sequence
  source: /note="Description of Artificial Sequence: Synthetic oligonucleotide"
gatttcaatataagattcggagg

SEQ ID NO: 1957 - DNA, 23 bp, Artificial Sequence
  source: /note="Description of Artificial Sequence: Synthetic oligonucleotide"
gcttaagcaatcccgaactctgg

SEQ ID NO: 1958 - DNA, 20 bp, Artificial Sequence
  source: /note="Description of Artificial Sequence: Synthetic oligonucleotide"
gccttctttatcccctatcg

SEQ ID NO: 1959 - DNA, 25 bp, Artificial Sequence
  source: /note="Description of Artificial Sequence: Synthetic oligonucleotide"
  modified_base (21)..(22): a, c, t, g, unknown or other
gaggccaaacctcggcttacnngrr

SEQ ID NO: 1960 - DNA, 25 bp, Artificial Sequence
  source: /note="Description of Artificial Sequence: Synthetic oligonucleotide"
  modified_base (21)..(22): a, c, t, g, unknown or other
gttcgaaaatttcaggtaagnngrr

SEQ ID NO: 1961 - DNA, 26 bp, Artificial Sequence
  source: /note="Description of Artificial Sequence: Synthetic oligonucleotide"
  modified_base (21)..(22): a, c, t, g, unknown or other
ggcagaacaggagataacagnngrrt

SEQ ID NO: 1962 - DNA, 26 bp, Artificial Sequence
  source: /note="Description of Artificial Sequence: Synthetic oligonucleotide"
ggcggccctcgcccttctctggggat

SEQ ID NO: 1963 - DNA, 23 bp, Artificial Sequence
  source: /note="Description of Artificial Sequence: Synthetic oligonucleotide"
gtagtgatcgtggatacgagagg

SEQ ID NO: 1964 - DNA, 23 bp, Artificial Sequence
  source: /note="Description of Artificial Sequence: Synthetic oligonucleotide"
gtacagccctcggtgtatattgg

SEQ ID NO: 1965 - DNA, 23 bp, Artificial Sequence
  source: /note="Description of Artificial Sequence: Synthetic oligonucleotide"
gggaaggaattaagcccgaatgg

SEQ ID NO: 1966 - DNA, 23 bp, Artificial Sequence
  source: /note="Description of Artificial Sequence: Synthetic oligonucleotide"
gggaacagctttcgtagttgagg

SEQ ID NO: 1967 - DNA, 23 bp, Artificial Sequence
  source: /note="Description of Artificial Sequence: Synthetic oligonucleotide"
gataaagtccagtgtcgatcagg

SEQ ID NO: 1968 - DNA, 23 bp, Artificial Sequence
  source: /note="Description of Artificial Sequence: Synthetic oligonucleotide"
gaaaaccagagcttcggtcaagg

SEQ ID NO: 1969 - DNA, 34 bp, Artificial Sequence
  source: /note="Description of Artificial Sequence: Synthetic oligonucleotide"
ggagtcttctgggcaggcttaaaggctaacctgg

SEQ ID NO: 1970 - DNA, 34 bp, Artificial Sequence
  source: /note="Description of Artificial Sequence: Synthetic oligonucleotide"
gtcgggtgagcatgtctttaatctacctcgatgg

SEQ ID NO: 1971 - DNA, 26 bp, Artificial Sequence
  source: /note="Description of Artificial Sequence: Synthetic oligonucleotide"
ggtgtcaccagagtaacagtctgagt

SEQ ID NO: 1972 - DNA, 25 bp, Artificial Sequence
  source: /note="Description of Artificial Sequence: Synthetic oligonucleotide"
gtgatcatcaagcagaaggtatgag

SEQ ID NO: 1973 - DNA, 29 bp, Artificial Sequence
  source: /note="Description of Artificial Sequence: Synthetic oligonucleotide"
gaacttcgaaaatttcaggtaagccgagg

SEQ ID NO: 1974 - DNA, 29 bp, Artificial Sequence
  source: /note="Description of Artificial Sequence: Synthetic oligonucleotide"
ggaaactcatcaaatatgcgtgttagtgt

SEQ ID NO: 1975 - DNA, 29 bp, Artificial Sequence
  source: /note="Description of Artificial Sequence: Synthetic oligonucleotide"
gtcatttacactaacacgcatatttgatg

SEQ ID NO: 1976 - DNA, 29 bp, Artificial Sequence
  source: /note="Description of Artificial Sequence: Synthetic oligonucleotide"
ggaatgaaactcatcaaatatgcgtgtta

SEQ ID NO: 1977 - DNA, 29 bp, Artificial Sequence
  source: /note="Description of Artificial Sequence: Synthetic oligonucleotide"
gtcatcaatatctttgaaggactctgggt

SEQ ID NO: 1978 - DNA, 29 bp, Artificial Sequence
  source: /note="Description of Artificial Sequence: Synthetic oligonucleotide"
gtgttttcataggaaaaataggcaagttg

SEQ ID NO: 1979 - DNA, 29 bp, Artificial Sequence
  source: /note="Description of Artificial Sequence: Synthetic oligonucleotide"
gaattggaaaatgtgatgggaaacagata

SEQ ID NO: 1980 - DNA, 29 bp, Artificial Sequence
  source: /note="Description of Artificial Sequence: Synthetic oligonucleotide"
gatgatcatcaagcagaaggtatgagaaa

SEQ ID NO: 1981 - DNA, 29 bp, Artificial Sequence
  source: /note="Description of Artificial Sequence: Synthetic oligonucleotide"
gagatgatcatcaagcagaaggtatgaga

SEQ ID NO: 1982 - DNA, 29 bp, Artificial Sequence
  source: /note="Description of Artificial Sequence: Synthetic oligonucleotide"
gcattttttctcataccttctgcttgatg

SEQ ID NO: 1983 - DNA, 29 bp, Artificial Sequence
  source: /note="Description of Artificial Sequence: Synthetic oligonucleotide"
gtcctactcagactgttactctggtgaca

SEQ ID NO: 1984 - DNA, 29 bp, Artificial Sequence
  source: /note="Description of Artificial Sequence: Synthetic oligonucleotide"
gacaggttgtgtcaccagagtaacagtct

SEQ ID NO: 1985 - DNA, 29 bp, Artificial Sequence
  source: /note="Description of Artificial Sequence: Synthetic oligonucleotide"
gttatcattttttctcataccttctgctt

SEQ ID NO: 1986 - DNA, 29 bp, Artificial Sequence
  source: /note="Description of Artificial Sequence: Synthetic oligonucleotide"
gttgcctaagaactggtgggaaatggtct

SEQ ID NO: 1987 - DNA, 29 bp, Artificial Sequence
  source: /note="Description of Artificial Sequence: Synthetic oligonucleotide"
gaaacagttgcctaagaactggtgggaaa

SEQ ID NO: 1988 - DNA, 29 bp, Artificial Sequence
  source: /note="Description of Artificial Sequence: Synthetic oligonucleotide"
gtttcccaccagttcttaggcaactgttt

SEQ ID NO: 1989 - DNA, 29 bp, Artificial Sequence
  source: /note="Description of Artificial Sequence: Synthetic oligonucleotide"
gtggctttgatttccctagggtccagctt

SEQ ID NO: 1990 - DNA, 29 bp, Artificial Sequence
  source: /note="Description of Artificial Sequence: Synthetic oligonucleotide"
gtagggaaatcaaagccaatgaaacgttc

SEQ ID NO: 1991 - DNA, 29 bp, Artificial Sequence
  source: /note="Description of Artificial Sequence: Synthetic oligonucleotide"
ggaccctagggaaatcaaagccaatgaaa

SEQ ID NO: 1992 - DNA, 29 bp, Artificial Sequence
  source: /note="Description of Artificial Sequence: Synthetic oligonucleotide"
gtgagggctccaccctcacgagtgggttt

SEQ ID NO: 1993 - DNA, 29 bp, Artificial Sequence
  source: /note="Description of Artificial Sequence: Synthetic oligonucleotide"
gaaggattgagggctccaccctcacgagt

SEQ ID NO: 1994 - DNA, 29 bp, Artificial Sequence
  source: /note="Description of Artificial Sequence: Synthetic oligonucleotide"
ggctccaccctcacgagtgggtttggttc

SEQ ID NO: 1995 - DNA, 29 bp, Artificial Sequence
  source: /note="Description of Artificial Sequence: Synthetic oligonucleotide"
gtatcccctatcgaggaaaccacgagttt

SEQ ID NO: 1996 - DNA, 29 bp, Artificial Sequence
  source: /note="Description of Artificial Sequence: Synthetic oligonucleotide"
ggataaagaaggcctatttcatagagttg

SEQ ID NO: 1997 - DNA, 29 bp, Artificial Sequence
  source: /note="Description of Artificial Sequence: Synthetic oligonucleotide"
gaggccttctttatcccctatcgaggaaa

SEQ ID NO: 1998 - DNA, 27 bp, Artificial Sequence
  source: /note="Description of Artificial Sequence: Synthetic oligonucleotide"
gtgagggctccaccctcacgagtgggt

SEQ ID NO: 1999 - DNA, 27 bp, Artificial Sequence
  source: /note="Description of Artificial Sequence: Synthetic oligonucleotide"
ggataaagaaggcctatttcatagagt

SEQ ID NO: 2000 - DNA, 24 bp, Artificial Sequence
  source: /note="Description of Artificial Sequence: Synthetic oligonucleotide"
caccgcagccgctcgctgcagcag

SEQ ID NO: 2001 - DNA, 24 bp, Artificial Sequence
  source: /note="Description of Artificial Sequence: Synthetic oligonucleotide"
aaacctgctgcagcgagcggctgc

SEQ ID NO: 2002 - DNA, 24 bp, Artificial Sequence
  source: /note="Description of Artificial Sequence: Synthetic oligonucleotide"
caccggctgggtgtcccattgaaa

SEQ ID NO: 2003 - DNA, 24 bp, Artificial Sequence
  source: /note="Description of Artificial Sequence: Synthetic oligonucleotide"
aaactttcaatgggacacccagcc

SEQ ID NO: 2004 - DNA, 24 bp, Artificial Sequence
  source: /note="Description of Artificial Sequence: Synthetic oligonucleotide"
caccggtttattcagccgggagtc

SEQ ID NO: 2005 - DNA, 24 bp, Artificial Sequence
  source: /note="Description of Artificial Sequence: Synthetic oligonucleotide"
aaacgactcccggctgaataaacc

SEQ ID NO: 2006 - DNA, 24 bp, Artificial Sequence
  source: /note="Description of Artificial Sequence: Synthetic oligonucleotide"
caccgtggagagtttgcaaggagc

SEQ ID NO: 2007 - DNA, 24 bp, Artificial Sequence
  source: /note="Description of Artificial Sequence: Synthetic oligonucleotide"
aaacgctccttgcaaactctccac

SEQ ID NO: 2008 - DNA, 24 bp, Artificial Sequence
  source: /note="Description of Artificial Sequence: Synthetic oligonucleotide"
caccgccctccagactttccacct

SEQ ID NO: 2009 - DNA, 24 bp, Artificial Sequence
  source: /note="Description of Artificial Sequence: Synthetic oligonucleotide"
aaacaggtggaaagtctggagggc

SEQ ID NO: 2010 - DNA, 24 bp, Artificial Sequence
  source: /note="Description of Artificial Sequence: Synthetic oligonucleotide"
caccgaattttcttccaagttctc

SEQ ID NO: 2011 - DNA, 24 bp, Artificial Sequence
  source: /note="Description of Artificial Sequence: Synthetic oligonucleotide"
aaacgagaacttggaagaaaattc

SEQ ID NO: 2012 - DNA, 24 bp, Artificial Sequence
  source: /note="Description of Artificial Sequence: Synthetic oligonucleotide"
caccgctgcggagagaagaaaggg

SEQ ID NO: 2013 - DNA, 24 bp, Artificial Sequence
  source: /note="Description of Artificial Sequence: Synthetic oligonucleotide"
aaacccctttcttctctccgcagc

SEQ ID NO: 2014 - DNA, 24 bp, Artificial Sequence
  source: /note="Description of Artificial Sequence: Synthetic oligonucleotide"
caccgagagccaccccctggctcc

SEQ ID NO: 2015 - DNA, 24 bp, Artificial Sequence
  source: /note="Description of Artificial Sequence: Synthetic oligonucleotide"
aaacggagccagggggtggctctc

SEQ ID NO: 2016 - DNA, 24 bp, Artificial Sequence
  source: /note="Description of Artificial Sequence: Synthetic oligonucleotide"
caccgcgaagccaaccgcggcggg

SEQ ID NO: 2017 - DNA, 24 bp, Artificial Sequence
  source: /note="Description of Artificial Sequence: Synthetic oligonucleotide"
aaaccccgccgcggttggcttcgc

SEQ ID NO: 2018 - DNA, 24 bp, Artificial Sequence
  source: /note="Description of Artificial Sequence: Synthetic oligonucleotide"
caccgagagggaagacgatcgccc

SEQ ID NO: 2019 - DNA, 24 bp, Artificial Sequence
  source: /note="Description of Artificial Sequence: Synthetic oligonucleotide"
aaacgggcgatcgtcttccctctc

SEQ ID NO: 2020 - DNA, 24 bp, Artificial Sequence
  source: /note="Description of Artificial Sequence: Synthetic oligonucleotide"
caccgcccctttaactttcctccg

SEQ ID NO: 2021 - DNA, 24 bp, Artificial Sequence
  source: /note="Description of Artificial Sequence: Synthetic oligonucleotide"
aaaccggaggaaagttaaaggggc

SEQ ID NO: 2022 - DNA, 24 bp, Artificial Sequence
  source: /note="Description of Artificial Sequence: Synthetic oligonucleotide"
caccggcagccccgcttccttcaa

SEQ ID NO: 2023 - DNA, 24 bp, Artificial Sequence
  source: /note="Description of Artificial Sequence: Synthetic oligonucleotide"
aaacttgaaggaagcggggctgcc

SEQ ID NO: 2024 - DNA, 24 bp, Artificial Sequence
  source: /note="Description of Artificial Sequence: Synthetic oligonucleotide"
caccgcgagagcgagaggagggag

SEQ ID NO: 2025 - DNA, 24 bp, Artificial Sequence
  source: /note="Description of Artificial Sequence: Synthetic oligonucleotide"
aaacctccctcctctcgctctcgc

SEQ ID NO: 2026 - DNA, 24 bp, Artificial Sequence
  source: /note="Description of Artificial Sequence: Synthetic oligonucleotide"
caccggagagagcttgagagcgcg

SEQ ID NO: 2027 - DNA, 24 bp, Artificial Sequence
  source: /note="Description of Artificial Sequence: Synthetic oligonucleotide"
aaaccgcgctctcaagctctctcc

SEQ ID NO: 2028 - DNA, 24 bp, Artificial Sequence
  source: /note="Description of Artificial Sequence: Synthetic oligonucleotide"
caccgggtggagggggcggggccc

SEQ ID NO: 2029 - DNA, 24 bp, Artificial Sequence
  source: /note="Description of Artificial Sequence: Synthetic oligonucleotide"
aaacgggccccgccccctccaccc

SEQ ID NO: 2030 - DNA, 24 bp, Artificial Sequence
  source: /note="Description of Artificial Sequence: Synthetic oligonucleotide"
caccgggtatccacgtaaatcaaa

SEQ ID NO: 2031 - DNA, 24 bp, Artificial Sequence
  source: /note="Description of Artificial Sequence: Synthetic oligonucleotide"
aaactttgatttacgtggataccc

SEQ ID NO: 2032 - DNA, 24 bp, Artificial Sequence
  source: /note="Description of Artificial Sequence: Synthetic oligonucleotide"
caccgccaatcactggctccggtc

SEQ ID NO: 2033 - DNA, 24 bp, Artificial Sequence
  source: /note="Description of Artificial Sequence: Synthetic oligonucleotide"
aaacgaccggagccagtgattggc

SEQ ID NO: 2034 - DNA, 24 bp, Artificial Sequence
  source: /note="Description of Artificial Sequence: Synthetic oligonucleotide"
caccgggcgcccgagggaagaaga

SEQ ID NO: 2035 - DNA, 24 bp, Artificial Sequence
  source: /note="Description of Artificial Sequence: Synthetic oligonucleotide"
aaactcttcttccctcgggcgccc

SEQ ID NO: 2036 - DNA, 24 bp, Artificial Sequence
  source: /note="Description of Artificial Sequence: Synthetic oligonucleotide"
caccggggtgggggtaccagagga

SEQ ID NO: 2037 - DNA, 24 bp, Artificial Sequence
  source: /note="Description of Artificial Sequence: Synthetic oligonucleotide"
aaactcctctggtacccccacccc

SEQ ID NO: 2038 - DNA, 24 bp, Artificial Sequence
  source: /note="Description of Artificial Sequence: Synthetic oligonucleotide"
caccgccggggacagaagagaggg

SEQ ID NO: 2039 - DNA, 24 bp, Artificial Sequence
  source: /note="Description of Artificial Sequence: Synthetic oligonucleotide"
aaacccctctcttctgtccccggc

SEQ ID NO: 2040 - DNA, 24 bp, Artificial Sequence
  source: /note="Description of Artificial Sequence: Synthetic oligonucleotide"
caccggagagagagtgggagaagc

SEQ ID NO: 2041 - DNA, 24 bp, Artificial Sequence
  source: /note="Description of Artificial Sequence: Synthetic oligonucleotide"
aaacgcttctcccactctctctcc

SEQ ID NO: 2042 - DNA, 24 bp, Artificial Sequence
  source: /note="Description of Artificial Sequence: Synthetic oligonucleotide"
caccgaaagtaactgtcaaatgcg

SEQ ID NO: 2043 - DNA, 24 bp, Artificial Sequence
  source: /note="Description of Artificial Sequence: Synthetic oligonucleotide"
aaaccgcatttgacagttactttc

SEQ ID NO: 2044 - DNA, 24 bp, Artificial Sequence
  source: /note="Description of Artificial Sequence: Synthetic oligonucleotide"
caccgttaaccagagcgcccagtc

SEQ ID NO: 2045 - DNA, 24 bp, Artificial Sequence
  source: /note="Description of Artificial Sequence: Synthetic oligonucleotide"
aaacgactgggcgctctggttaac

SEQ ID NO: 2046 - DNA, 24 bp, Artificial Sequence
  source: /note="Description of Artificial Sequence: Synthetic oligonucleotide"
caccgcgtcggagctgcccgctag

SEQ ID NO: 2047 - DNA, 24 bp, Artificial Sequence
  source: /note="Description of Artificial Sequence: Synthetic oligonucleotide"
aaacctagcgggcagctccgacgc

SEQ ID NO: 2048 - DNA, 19 bp, Artificial Sequence
  source: /note="Description of Artificial Sequence: Synthetic oligonucleotide"
tgtactctctgaggtgctc

SEQ ID NO: 2049 - DNA, 19 bp, Artificial Sequence
  source: /note="Description of Artificial Sequence: Synthetic oligonucleotide"
acgcagataagaaccagtt

SEQ ID NO: 2050 - DNA, 19 bp, Artificial Sequence
  source: /note="Description of Artificial Sequence: Synthetic oligonucleotide"
catcaagtcagccatcagc

SEQ ID NO: 2051 - DNA, 19 bp, Artificial Sequence
  source: /note="Description of Artificial Sequence: Synthetic oligonucleotide"
gagtcaccctcctggaaac

SEQ ID NO: 2052 - DNA, 19 bp, Artificial Sequence
  source: /note="Description of Artificial Sequence: Synthetic oligonucleotide"
cctgggctccggggcgttt

SEQ ID NO: 2053 - DNA, 19 bp, Artificial Sequence
  source: /note="Description of Artificial Sequence: Synthetic oligonucleotide"
ggcccctgcggccaccccg

SEQ ID NO: 2054 - DNA, 19 bp, Artificial Sequence
  source: /note="Description of Artificial Sequence: Synthetic oligonucleotide"
ctccctccctgcccggtag

SEQ ID NO: 2055 - DNA, 19 bp, Artificial Sequence
  source: /note="Description of Artificial Sequence: Synthetic oligonucleotide"
aggtttggaaagggcgtgc

SEQ ID NO: 2056 - DNA, 20 bp, Artificial Sequence
  source: /note="Description of Artificial Sequence: Synthetic oligonucleotide"
actccactgcactccagtct

SEQ ID NO: 2057 - DNA, 20 bp, Artificial Sequence
  source: /note="Description of Artificial Sequence: Synthetic oligonucleotide"
tctgtgggggacctgcactg

SEQ ID NO: 2058 - DNA, 20 bp, Artificial Sequence
  source: /note="Description of Artificial Sequence: Synthetic oligonucleotide"
ggggcgccagttgtgtctcc

SEQ ID NO: 2059 - DNA, 20 bp, Artificial Sequence
  source: /note="Description of Artificial Sequence: Synthetic oligonucleotide"
acaccattgccaccaccatt

SEQ ID NO: 2060 - DNA, 20 bp, Artificial Sequence
  source: /note="Description of Artificial Sequence: Synthetic oligonucleotide"
caatgaccccttcattgacc

SEQ ID NO: 2061 - DNA, 20 bp, Artificial Sequence
  source: /note="Description of Artificial Sequence: Synthetic oligonucleotide"
ttgattttggagggatctcg

SEQ ID NO: 2062 - DNA, 20 bp, Artificial Sequence
  source: /note="Description of Artificial Sequence: Synthetic oligonucleotide"
ggaatccatggagggaagat

SEQ ID NO: 2063 - DNA, 20 bp, Artificial Sequence
  source: /note="Description of Artificial Sequence: Synthetic oligonucleotide"
tgttctcgctcaggtcagtg

SEQ ID NO: 2064 - DNA, 20 bp, Artificial Sequence
  source: /note="Description of Artificial Sequence: Synthetic oligonucleotide"
ctctctgctcctttgccaca

SEQ ID NO: 2065 - DNA, 20 bp, Artificial Sequence
  source: /note="Description of Artificial Sequence: Synthetic oligonucleotide"
gtgctcttcgggtttcagga

SEQ ID NO: 2066 - DNA, 30 bp, Artificial Sequence
  source: /note="Description of Artificial Sequence: Synthetic oligonucleotide"
cgaaagagaaagcgaaccagtatcgagaac

SEQ ID NO: 2067 - DNA, 27 bp, Artificial Sequence
  source: /note="Description of Artificial Sequence: Synthetic oligonucleotide"
cgttgtgcatagtcgctgcttgatcgc

SEQ ID NO: 2068 - RNA, 20 nt, Artificial Sequence
  source: /note="Description of Artificial Sequence: Synthetic oligonucleotide"
uagaagaucugagcucugag

SEQ ID NO: 2069 - RNA, 20 nt, Artificial Sequence
  source: /note="Description of Artificial Sequence: Synthetic oligonucleotide"
agaucugagcucugagugga

SEQ ID NO: 2070 - RNA, 20 nt, Artificial Sequence
  source: /note="Description of Artificial Sequence: Synthetic oligonucleotide"
ucugagcucugaguggaagg

SEQ ID NO: 2071 - RNA, 20 nt, Artificial Sequence
  source: /note="Description of Artificial Sequence: Synthetic oligonucleotide"
ccguuuacuucaagagcuga

SEQ ID NO: 2072 - RNA, 20 nt, Artificial Sequence
  source: /note="Description of Artificial Sequence: Synthetic oligonucleotide"
aagcagccugaccuagcucc

SEQ ID NO: 2073 - RNA, 20 nt, Artificial Sequence
  source: /note="Description of Artificial Sequence: Synthetic oligonucleotide"
gcuccuggacugaccacuau

SEQ ID NO: 2074 - RNA, 20 nt, Artificial Sequence
  source: /note="Description of Artificial Sequence: Synthetic oligonucleotide"
cccucagcucuugaaguaaa

SEQ ID NO: 2075 - RNA, 20 nt, Artificial Sequence
  source: /note="Description of Artificial Sequence: Synthetic oligonucleotide"
gucaguccaggagcuagguc

SEQ ID NO: 2076 - RNA, 20 nt, Artificial Sequence
  source: /note="Description of Artificial Sequence: Synthetic oligonucleotide"
uaguggucaguccaggagcu

SEQ ID NO: 2077 - RNA, 20 nt, Artificial Sequence
  source: /note="Description of Artificial Sequence: Synthetic oligonucleotide"
gcuccaauaguggucagucc

SEQ ID NO: 2078 - RNA, 20 nt, Artificial Sequence
  source: /note="Description of Artificial Sequence: Synthetic oligonucleotide"
uggccaaagaccuccgccag

SEQ ID NO: 2079 - RNA, 20 nt, Artificial Sequence
  source: /note="Description of Artificial Sequence: Synthetic oligonucleotide"
guggcagacaaauguagaug

SEQ ID NO: 2080 - RNA, 20 nt, Artificial Sequence
  source: /note="Description of Artificial Sequence: Synthetic oligonucleotide"
uguagauguggcaaaugacu

SEQ ID NO: 2081 - RNA, 20 nt, Artificial Sequence
  source: /note="Description of Artificial Sequence: Synthetic oligonucleotide"
cuuggcccugaaacuucucc

SEQ ID NO: 2082 - RNA, 20 nt, Artificial Sequence
  source: /note="Description of Artificial Sequence: Synthetic oligonucleotide"
cagagaauaucaaugccucu

SEQ ID NO: 2083 - RNA, 20 nt, Artificial Sequence
  source: /note="Description of Artificial Sequence: Synthetic oligonucleotide"
cagagaauaucaaugccucu

SEQ ID NO: 2084 - RNA, 20 nt, Artificial Sequence
  source: /note="Description of Artificial Sequence: Synthetic oligonucleotide"
cauuugucugccacuggcgg

SEQ ID NO: 2085 - RNA, 20 nt, Artificial Sequence
  source: /note="Description of Artificial Sequence: Synthetic oligonucleotide"
cuacauuugucugccacugg

SEQ ID NO: 2086 - RNA, 20 nt, Artificial Sequence
  source: /note="Description of Artificial Sequence: Synthetic oligonucleotide"
caucuacauuugucugccac

SEQ ID NO: 2087 - RNA, 20 nt, Artificial Sequence
  source: /note="Description of Artificial Sequence: Synthetic oligonucleotide"
auaaucccggagaaguuuca

SEQ ID NO: 2088 - RNA, 20 nt, Artificial Sequence
  source: /note="Description of Artificial Sequence: Synthetic oligonucleotide"
uaucaucugcagaauaaucc

SEQ ID NO: 2089 - RNA, 20 nt, Artificial Sequence
  source: /note="Description of Artificial Sequence: Synthetic oligonucleotide"
uguuaucauguggacuuuuc

SEQ ID NO: 2090 - RNA, 20 nt, Artificial Sequence
  source: /note="Description of Artificial Sequence: Synthetic oligonucleotide"
ugauauaucauuucucugug

SEQ ID NO: 2091 - RNA, 20 nt, Artificial Sequence
  source: /note="Description of Artificial Sequence: Synthetic oligonucleotide"
uuuaugaaugcuucuccaag

SEQ ID NO: 2092 - RNA, 21 nt, Artificial Sequence
  source: /note="Description of Artificial Sequence: Synthetic oligonucleotide"
uucuccaggcuagaagaacaa

SEQ ID NO: 2093 - RNA, 21 nt, Artificial Sequence
  source: /note="Description of Artificial Sequence: Synthetic oligonucleotide"
cugcucuuuuccagguucaag

SEQ ID NO: 2094 - RNA, 21 nt, Artificial Sequence
  source: /note="Description of Artificial Sequence: Synthetic oligonucleotide"
gucuguuucaguuacuggugg

SEQ ID NO: 2095 - RNA, 21 nt, Artificial Sequence
  source: /note="Description of Artificial Sequence: Synthetic oligonucleotide"
uccaguuucauuuaauuguuu

SEQ ID NO: 2096 - RNA, 21 nt, Artificial Sequence
  source: /note="Description of Artificial Sequence: Synthetic oligonucleotide"
cuuaugggagcacuuacaagc

SEQ ID NO: 2097 - RNA, 21 nt, Artificial Sequence
  source: /note="Description of Artificial Sequence: Synthetic oligonucleotide"
uugcuucauuaccuucacugg

SEQ ID NO: 2098 - RNA, 21 nt, Artificial Sequence
  source: /note="Description of Artificial Sequence: Synthetic oligonucleotide"
uugugucaccagaguaacagu

SEQ ID NO: 2099 - RNA, 21 nt, Artificial Sequence
  source: /note="Description of Artificial Sequence: Synthetic oligonucleotide"
aguaaccacagguugugucac

SEQ ID NO: 2100 - RNA, 21 nt, Artificial Sequence
  source: /note="Description of Artificial Sequence: Synthetic oligonucleotide"
uucaaauuuugggcagcggua

SEQ ID NO: 2101 - RNA, 21 nt, Artificial Sequence
  source: /note="Description of Artificial Sequence: Synthetic oligonucleotide"
caagaggcuagaacaaucauu

SEQ ID NO: 2102 - RNA, 21 nt, Artificial Sequence
  source: /note="Description of Artificial Sequence: Synthetic oligonucleotide"
uuguacuucaucccacugauu

SEQ ID NO: 2103 - RNA, 21 nt, Artificial Sequence
  source: /note="Description of Artificial Sequence: Synthetic oligonucleotide"
cuucagaaccggaggcaacag

SEQ ID NO: 2104 - RNA, 21 nt, Artificial Sequence
  source: /note="Description of Artificial Sequence: Synthetic oligonucleotide"
caacaguugaaugaaauguua

SEQ ID NO: 2105 - RNA, 21 nt, Artificial Sequence
  source: /note="Description of Artificial Sequence: Synthetic oligonucleotide"
gccaagcuugagucauggaag

SEQ ID NO: 2106 - RNA, 21 nt, Artificial Sequence
  source: /note="Description of Artificial Sequence: Synthetic oligonucleotide"
cuugguuucugugauuuucuu

SEQ ID NO: 2107 - RNA, 21 nt, Artificial Sequence
  source: /note="Description of Artificial Sequence: Synthetic oligonucleotide"
ucauuucacaggccuucaaga

SEQ ID NO: 2108 - RNA, 21 nt, Artificial Sequence
  source: /note="Description of Artificial Sequence: Synthetic oligonucleotide"
cagaaauauucguacagucuc

SEQ ID NO: 2109 - RNA, 21 nt, Artificial Sequence
  source: /note="Description of Artificial Sequence: Synthetic oligonucleotide"
caauuaccucugggcuccugg

SEQ ID NO: 2110 - RNA, 19 nt, Artificial Sequence
  source: /note="Description of Artificial Sequence: Synthetic oligonucleotide"
gaacuucuauuuaauuuug

SEQ ID NO: 2111 - RNA, 20 nt, Artificial Sequence
  source: /note="Description of Artificial Sequence: Synthetic oligonucleotide"
auuucagguaagccgagguu

SEQ ID NO: 2112 - RNA, 20 nt, Artificial Sequence
  source: /note="Description of Artificial Sequence: Synthetic oligonucleotide"
ucuuaauaauguuucacugu

SEQ ID NO: 2113 - RNA, 20 nt, Artificial Sequence
  source: /note="Description of Artificial Sequence: Synthetic oligonucleotide"
auaauuucuauuauauuaca

SEQ ID NO: 2114 - RNA, 20 nt, Artificial Sequence
  source: /note="Description of Artificial Sequence: Synthetic oligonucleotide"
uuucauucauaucaagaaga

SEQ ID NO: 2115 - RNA, 20 nt, Artificial Sequence
  source: /note="Description of Artificial Sequence: Synthetic oligonucleotide"
auaguuuaaaggccaaaccu

SEQ ID NO: 2116 - RNA, 20 nt, Artificial Sequence
  source: /note="Description of Artificial Sequence: Synthetic oligonucleotide"
ugugaaaaaauauaguuuaa

SEQ ID NO: 2117 - RNA, 20 nt, Artificial Sequence
  source: /note="Description of Artificial Sequence: Synthetic oligonucleotide"
cgaaaauuucagguaagccg

SEQ ID NO: 2118 - DNA, 23 bp, Artificial Sequence
  source: /note="Description of Artificial Sequence: Synthetic oligonucleotide"
caaaaacccaaaatattttagct

SEQ ID NO: 2119 - DNA, 23 bp, Artificial Sequence
  source: /note="Description of Artificial Sequence: Synthetic oligonucleotide"
cctttttggtatcttacaggaac

SEQ ID NO: 2120 - DNA, 23 bp, Artificial Sequence
  source: /note="Description of Artificial Sequence: Synthetic oligonucleotide"
ccgctgcccaatgccatcctgga

SEQ ID NO: 2121 - DNA, 23 bp, Artificial Sequence
  source: /note="Description of Artificial Sequence: Synthetic oligonucleotide"
tttttccttttattctagttgaa

SEQ ID NO: 2122 - DNA, 23 bp, Artificial Sequence
  source: /note="Description of Artificial Sequence: Synthetic oligonucleotide"
ttgatccatatgcttttacctgc

SEQ ID NO: 2123 - DNA, 23 bp, Artificial Sequence
  source: /note="Description of Artificial Sequence: Synthetic oligonucleotide"
tcaacagatctgtcaaatcgcct

SEQ ID NO: 2124 - DNA, 23 bp, Artificial Sequence
  source: /note="Description of Artificial Sequence: Synthetic oligonucleotide"
ttcttctttctccaggctagaag

SEQ ID NO: 2125 - DNA, 23 bp, Artificial Sequence
  source: /note="Description of Artificial Sequence: Synthetic oligonucleotide"
gttcttctagcctggagaaagaa

SEQ ID NO: 2126 - DNA, 23 bp, Artificial Sequence
  source: /note="Description of Artificial Sequence: Synthetic oligonucleotide"
caaatcctgcattgttgcctgta

SEQ ID NO: 2127 - DNA, 23 bp, Artificial Sequence
  source: /note="Description of Artificial Sequence: Synthetic oligonucleotide"
ctgttaaagaggaagttagaaga

SEQ ID NO: 2128 - DNA, 23 bp, Artificial Sequence
  source: /note="Description of Artificial Sequence: Synthetic oligonucleotide"
aaaatttttatattacagaatat

SEQ ID NO: 2129 - DNA, 23 bp, Artificial Sequence
  source: /note="Description of Artificial Sequence: Synthetic oligonucleotide"
ttgtagactatcttttatattct

SEQ ID NO: 2130 - DNA, 23 bp, Artificial Sequence
  source: /note="Description of Artificial Sequence: Synthetic oligonucleotide"
ttttgcattttagatgaaagaga

SEQ ID NO: 2131 - DNA, 23 bp, Artificial Sequence
  source: /note="Description of Artificial Sequence: Synthetic oligonucleotide"
aacatcttctctttcatctaaaa

SEQ ID NO: 2132 - DNA, 23 bp, Artificial Sequence
  source: /note="Description of Artificial Sequence: Synthetic oligonucleotide"
ttttgaacatcttctctttcatc

SEQ ID NO: 2133 - DNA, 23 bp, Artificial Sequence
  source: /note="Description of Artificial Sequence: Synthetic oligonucleotide"
caaaaacccaaaatattttagct

SEQ ID NO: 2134 - DNA, 23 bp, Artificial Sequence
  source: /note="Description of Artificial Sequence: Synthetic oligonucleotide"
gcttgtgtttctaatttttcttt

SEQ ID NO: 2135 - DNA, 23 bp, Artificial Sequence
  source: /note="Description of Artificial Sequence: Synthetic oligonucleotide"
acttattgttattgaaattggct

SEQ ID NO: 2136 - DNA, 23 bp, Artificial Sequence
  source: /note="Description of Artificial Sequence: Synthetic oligonucleotide"
taccatgtattgctaaacaaagt

SEQ ID NO: 2137 - DNA, 23 bp, Artificial Sequence
  source: /note="Description of Artificial Sequence: Synthetic oligonucleotide"
gtatcaattcacaccagcaagtt

SEQ ID NO: 2138 - DNA, 23 bp, Artificial Sequence
  source: /note="Description of Artificial Sequence: Synthetic oligonucleotide"
ctcctctgtaaagtggcgattat

SEQ ID NO: 2139 - DNA, 23 bp, Artificial Sequence
  source: /note="Description of Artificial Sequence: Synthetic oligonucleotide"
tttaaaatgaagattttccacca

SEQ ID NO: 2140 - DNA, 23 bp, Artificial Sequence
  source: /note="Description of Artificial Sequence: Synthetic oligonucleotide"
aaatgaagattttccaccaatca

SEQ ID NO: 2141 - DNA, 23 bp, Artificial Sequence
  source: /note="Description of Artificial Sequence: Synthetic oligonucleotide"
ccaccaatcactttactctccta

SEQ ID NO: 2142 - DNA, 23 bp, Artificial Sequence
  source: /note="Description of Artificial Sequence: Synthetic oligonucleotide"
ccaccagttcttaggcaactgtt

SEQ ID NO: 2143 - DNA, 23 bp, Artificial Sequence
  source: /note="Description of Artificial Sequence: Synthetic oligonucleotide"
cattaatttatatccttgattat

SEQ ID NO: 2144 - DNA, 23 bp, Artificial Sequence
  source: /note="Description of Artificial Sequence: Synthetic oligonucleotide"
gttgttgttgttaaggtcaaagt

SEQ ID NO: 2145 - DNA, 23 bp, Artificial Sequence
  source: /note="Description of Artificial Sequence: Synthetic oligonucleotide"
aaattaccctagatcttaaagtt

SEQ ID NO: 2146 - DNA, 24 bp, Artificial Sequence
  source: /note="Description of Artificial Sequence: Synthetic oligonucleotide"
gcctctgattagggtgggggcgtg

SEQ ID NO: 2147 - DNA, 24 bp, Artificial Sequence
  source: /note="Description of Artificial Sequence: Synthetic oligonucleotide"
tcacaggctccaggaagggtttgg

SEQ ID NO: 2148 - DNA, 24 bp, Artificial Sequence
  source: /note="Description of Artificial Sequence: Synthetic oligonucleotide"
cccaggggggcctctttcggaagg

SEQ ID NO: 2149 - DNA, 24 bp, Artificial Sequence
  source: /note="Description of Artificial Sequence: Synthetic oligonucleotide"
ggaaggctctcttggtgatggaga

SEQ ID NO: 2150 - DNA, 24 bp, Artificial Sequence
  source: /note="Description of Artificial Sequence: Synthetic oligonucleotide"
aagctagtctagtgcaagctaaca

SEQ ID NO: 2151 - DNA, 24 bp, Artificial Sequence
  source: /note="Description of Artificial Sequence: Synthetic oligonucleotide"
ctggcctatgttattacctgtatg

SEQ ID NO: 2152 - DNA, 24 bp, Artificial Sequence
  source: /note="Description of Artificial Sequence: Synthetic oligonucleotide"
tggcctatgttattacctgtatgg

SEQ ID NO: 2153 - DNA, 23 bp, Artificial Sequence
  source: /note="Description of Artificial Sequence: Synthetic oligonucleotide"
ttccattctaatgggtggctgtt

SEQ ID NO: 2154 - DNA, 20 bp, Artificial Sequence
  source: /note="Description of Artificial Sequence: Synthetic oligonucleotide"
ctcctctgtaaagtggcgat

SEQ ID NO: 2155 - DNA, 20 bp, Artificial Sequence
  source: /note="Description of Artificial Sequence: Synthetic oligonucleotide"
ttccattctaatgggtggct

SEQ ID NO: 2156 - DNA, 20 bp, Artificial Sequence
  source: /note="Description of Artificial Sequence: Synthetic oligonucleotide"
gtatcaattcacaccagcaa

SEQ ID NO: 2157 - DNA, 20 bp, Artificial Sequence
  source: /note="Description of Artificial Sequence: Synthetic oligonucleotide"
taccatgtattgctaaacaa

SEQ ID NO: 2158 - DNA, 20 bp, Artificial Sequence
  source: /note="Description of Artificial Sequence: Synthetic oligonucleotide"
acttattgttattgaaattg

SEQ ID NO: 2159 - DNA, 20 bp, Artificial Sequence
  source: /note="Description of Artificial Sequence: Synthetic oligonucleotide"
gcttgtgtttctaatttttc

SEQ ID NO: 2160 - DNA, 20 bp, Artificial Sequence
  source: /note="Description of Artificial Sequence: Synthetic oligonucleotide"
caaaaacccaaaatatttta

SEQ ID NO: 2161 - DNA, 20 bp, Artificial Sequence
  source: /note="Description of Artificial Sequence: Synthetic oligonucleotide"
tttaaaatgaagattttcca

SEQ ID NO: 2162 - DNA, 20 bp, Artificial Sequence
  source: /note="Description of Artificial Sequence: Synthetic oligonucleotide"
aaatgaagattttccaccaa

SEQ ID NO: 2163 - DNA, 20 bp, Artificial Sequence
  source: /note="Description of Artificial Sequence: Synthetic oligonucleotide"
ccaccaatcactttactctc

SEQ ID NO: 2164 - DNA, 20 bp, Artificial Sequence
  source: /note="Description of Artificial Sequence: Synthetic oligonucleotide"
ccaccagttcttaggcaact

SEQ ID NO: 2165 - DNA, 20 bp, Artificial Sequence
  source: /note="Description of Artificial Sequence: Synthetic oligonucleotide"
cattaatttatatccttgat

SEQ ID NO: 2166 - DNA, 20 bp, Artificial Sequence
  source: /note="Description of Artificial Sequence: Synthetic oligonucleotide"
agttatagctctctttcaat

SEQ ID NO: 2167 - DNA, 20 bp, Artificial Sequence
  source: /note="Description of Artificial Sequence: Synthetic oligonucleotide"
atgtataacaattccaacat

SEQ ID NO: 2168 - DNA, 20 bp, Artificial Sequence
  source: /note="Description of Artificial Sequence: Synthetic oligonucleotide"
aaattaccctagatcttaaa

SEQ ID NO: 2169 - DNA, 20 bp, Artificial Sequence
  source: /note="Description of Artificial Sequence: Synthetic oligonucleotide"
gttgttgttgttaaggtcaa

SEQ ID NO: 2170 - DNA, 20 bp, Artificial Sequence
  source: /note="Description of Artificial Sequence: Synthetic oligonucleotide"
gcttgtgtttctaatttttc

SEQ ID NO: 2171 - DNA, 20 bp, Artificial Sequence
  source: /note="Description of Artificial Sequence: Synthetic oligonucleotide"
taatttttctttttcttctt

SEQ ID NO: 2172 - DNA, 20 bp, Artificial Sequence
  source: /note="Description of Artificial Sequence: Synthetic oligonucleotide"
gcaaaaaggaaaaaagaaga

SEQ ID NO: 2173 - DNA, 20 bp, Artificial Sequence
  source: /note="Description of Artificial Sequence: Synthetic oligonucleotide"
gggtttttgcaaaaaggaaa

SEQ ID NO: 2174 - DNA, 20 bp, Artificial Sequence
  source: /note="Description of Artificial Sequence: Synthetic oligonucleotide"
agctcctactcagactgtta

SEQ ID NO: 2175 - DNA, 20 bp, Artificial Sequence
  source: /note="Description of Artificial Sequence: Synthetic oligonucleotide"
tgcaaaaacccaaaatattt

SEQ ID NO: 2176 - DNA, 20 bp, Artificial Sequence
  source: /note="Description of Artificial Sequence: Synthetic oligonucleotide"
tgtcaccagagtaacagtct

SEQ ID NO: 2177 - DNA, 20 bp, Artificial Sequence
  source: /note="Description of Artificial Sequence: Synthetic oligonucleotide"
cttagtaaccacaggttgtg

SEQ ID NO: 2178 - DNA, 20 bp, Artificial Sequence
  source: /note="Description of Artificial Sequence: Synthetic oligonucleotide"
tagtttggagatggcagttt

SEQ ID NO: 2179 - DNA, 20 bp, Artificial Sequence
  source: /note="Description of Artificial Sequence: Synthetic oligonucleotide"
gagatggcagtttccttagt

SEQ ID NO: 2180 - DNA, 20 bp, Artificial Sequence
  source: /note="Description of Artificial Sequence: Synthetic oligonucleotide"
cttgatgttggaggtacctg

SEQ ID NO: 2181 - DNA, 20 bp, Artificial Sequence
  source: /note="Description of Artificial Sequence: Synthetic oligonucleotide"
atgttggaggtacctgctct

SEQ ID NO: 2182 - DNA, 20 bp, Artificial Sequence
  source: /note="Description of Artificial Sequence: Synthetic oligonucleotide"
taacttgatcaagcagagaa

SEQ ID NO: 2183 - DNA, 20 bp, Artificial Sequence
  source: /note="Description of Artificial Sequence: Synthetic oligonucleotide"
tctgcttgatcaagttataa

SEQ ID NO: 2184 - DNA, 20 bp, Artificial Sequence
  source: /note="Description of Artificial Sequence: Synthetic oligonucleotide"
taaaatcacagagggtgatg

SEQ ID NO: 2185 - DNA, 20 bp, Artificial Sequence
  source: /note="Description of Artificial Sequence: Synthetic oligonucleotide"
atatcctcaaggtcacccac

SEQ ID NO: 2186 - DNA, 20 bp, Artificial Sequence
  source: /note="Description of Artificial Sequence: Synthetic oligonucleotide"
atgatcatctcgttgatatc

SEQ ID NO: 2187 - DNA, 20 bp, Artificial Sequence
  source: /note="Description of Artificial Sequence: Synthetic oligonucleotide"
tcataccttctgcttgatga

SEQ ID NO: 2188 - DNA, 20 bp, Artificial Sequence
  source: /note="Description of Artificial Sequence: Synthetic oligonucleotide"
tcattttttctcataccttc

SEQ ID NO: 2189 - DNA, 20 bp, Artificial Sequence
  source: /note="Description of Artificial Sequence: Synthetic oligonucleotide"
tgccaacttttatcattttt

SEQ ID NO: 2190 - DNA, 20 bp, Artificial Sequence
  source: /note="Description of Artificial Sequence: Synthetic oligonucleotide"
aatcagaaagaagatcttat

SEQ ID NO: 2191 - DNA, 20 bp, Artificial Sequence
  source: /note="Description of Artificial Sequence: Synthetic oligonucleotide"
atttccctagggtccagctt

SEQ ID NO: 2192 - DNA, 20 bp, Artificial Sequence
  source: /note="Description of Artificial Sequence: Synthetic oligonucleotide"
gctcaaattgttactcttca

SEQ ID NO: 2193 - DNA, 20 bp, Artificial Sequence
  source: /note="Description of Artificial Sequence: Synthetic oligonucleotide"
agctcctactcagactgtta

SEQ ID NO: 2194 - DNA, 20 bp, Artificial Sequence
  source: /note="Description of Artificial Sequence: Synthetic oligonucleotide"
attctagtactatgcatctt

SEQ ID NO: 2195 - DNA, 20 bp, Artificial Sequence
  source: /note="Description of Artificial Sequence: Synthetic oligonucleotide"
acttaagttacttgtccagg

SEQ ID NO: 2196 - DNA, 20 bp, Artificial Sequence
  source: /note="Description of Artificial Sequence: Synthetic oligonucleotide"
ccaaggtcccagagttccta

SEQ ID NO: 2197 - DNA, 20 bp, Artificial Sequence
  source: /note="Description of Artificial Sequence: Synthetic oligonucleotide"
tttccctggcaaggtctgaa

SEQ ID NO: 2198 - DNA, 20 bp, Artificial Sequence
  source: /note="Description of Artificial Sequence: Synthetic oligonucleotide"
gctcattctcatgcctggac

SEQ ID NO: 2199 - DNA, 20 bp, Artificial Sequence
  source: /note="Description of Artificial Sequence: Synthetic oligonucleotide"
tttagcaatacatggtagaa

SEQ ID NO: 2200 - DNA, 20 bp, Artificial Sequence
  source: /note="Description of Artificial Sequence: Synthetic oligonucleotide"
agccaaactcttattcatga

SEQ ID NO: 2201 - DNA, 20 bp, Artificial Sequence
  source: /note="Description of Artificial Sequence: Synthetic oligonucleotide"
taacaatgtggatactttgt

SEQ ID NO: 2202 - RNA, 21 nt, Artificial Sequence
  source: /note="Description of Artificial Sequence: Synthetic oligonucleotide"
guguuauuacuugcuacugca

SEQ ID NO: 2203 - RNA, 21 nt, Artificial Sequence
  source: /note="Description of Artificial Sequence: Synthetic oligonucleotide"
guguauugcuuguacuacuca

SEQ ID NO: 2204 - RNA, 21 nt, Artificial Sequence
  source: /note="Description of Artificial Sequence: Synthetic oligonucleotide"
guuuaaauguaaauagcucag

SEQ ID NO: 2205 - RNA, 22 nt, Artificial Sequence
  source: /note="Description of Artificial Sequence: Synthetic oligonucleotide"
gaauuuucaaugauguucuggg

SEQ ID NO: 2206 - RNA, 22 nt, Artificial Sequence
  source: /note="Description of Artificial Sequence: Synthetic oligonucleotide"
gaacuggugggaaauggucuag

SEQ ID NO: 2207 - RNA, 22 nt, Artificial Sequence
  source: /note="Description of Artificial Sequence: Synthetic oligonucleotide"
guuucauuggcuuugauuuccc

SEQ ID NO: 2208 - RNA, 21 nt, Artificial Sequence
  source: /note="Description of Artificial Sequence: Synthetic oligonucleotide"
ggcaauucuccugaauagaaa

SEQ ID NO: 2209 - RNA, 22 nt, Artificial Sequence
  source: /note="Description of Artificial Sequence: Synthetic oligonucleotide"
gauuauacuuaggcugaauagu

SEQ ID NO: 2210 - RNA, 21 nt, Artificial Sequence
  source: /note="Description of Artificial Sequence: Synthetic oligonucleotide"
gacuuccagaauuauguguuc

SEQ ID NO: 2211 - RNA, 21 nt, Artificial Sequence
  source: /note="Description of Artificial Sequence: Synthetic oligonucleotide"
gugagggccugacacauggua

SEQ ID NO: 2212 - RNA, 21 nt, Artificial Sequence
  source: /note="Description of Artificial Sequence: Synthetic oligonucleotide"
gugaagaucauuucuugguag

SEQ ID NO: 2213 - RNA, 21 nt, Artificial Sequence
  source: /note="Description of Artificial Sequence: Synthetic oligonucleotide"
gcacagucagaacuagugugc

SEQ ID NO: 2214 - RNA, 21 nt, Artificial Sequence
  source: /note="Description of Artificial Sequence: Synthetic oligonucleotide"
gaguaagcccgaucauuauug

SEQ ID NO: 2215 - RNA, 21 nt, Artificial Sequence
  source: /note="Description of Artificial Sequence: Synthetic oligonucleotide"
ggaagggacauauucuauggg

SEQ ID NO: 2216 - RNA, 21 nt, Artificial Sequence
  source: /note="Description of Artificial Sequence: Synthetic oligonucleotide"
gaccacaagcugacuuggggg

SEQ ID NO: 2217 - RNA, 21 nt, Artificial Sequence
  source: /note="Description of Artificial Sequence: Synthetic oligonucleotide"
ggauuuguauccauuaucugg

SEQ ID NO: 2218 - RNA, 20 nt, Artificial Sequence
  source: /note="Description of Artificial Sequence: Synthetic oligonucleotide"
cucugcauuguuuuggccuc

SEQ ID NO: 2219 - RNA, 20 nt, Artificial Sequence
  source: /note="Description of Artificial Sequence: Synthetic oligonucleotide"
uccuccaaagaguagaaugg

SEQ ID NO: 2220 - RNA, 20 nt, Artificial Sequence
  source: /note="Description of Artificial Sequence: Synthetic oligonucleotide"
gcccuaaacuuacacuguuc

SEQ ID NO: 2221 - RNA, 20 nt, Artificial Sequence
  source: /note="Description of Artificial Sequence: Synthetic oligonucleotide"
aaagauagauuagauugucc

SEQ ID NO: 2222 - RNA, 20 nt, Artificial Sequence
  source: /note="Description of Artificial Sequence: Synthetic oligonucleotide"
guugcuaaauuacauaguuu

SEQ ID NO: 2223 - RNA, 20 nt, Artificial Sequence
  source: /note="Description of Artificial Sequence: Synthetic oligonucleotide"
uguugcaauagucaaucaag

SEQ ID NO: 2224 - RNA, 20 nt, Artificial Sequence
  source: /note="Description of Artificial Sequence: Synthetic oligonucleotide"
auacugauuaagacagauga

SEQ ID NO: 2225 - RNA, 20 nt, Artificial Sequence
  source: /note="Description of Artificial Sequence: Synthetic oligonucleotide"
aauacugauuaagacagaug

SEQ ID NO: 2226 - RNA, 20 nt, Artificial Sequence
  source: /note="Description of Artificial Sequence: Synthetic oligonucleotide"
cucuauacaaaugccaacgc

SEQ ID NO: 2227 - RNA, 20 nt, Artificial Sequence
  source: /note="Description of Artificial Sequence: Synthetic oligonucleotide"
acuugcaugcacaccagcgu

SEQ ID NO: 2228 - RNA, 20 nt, Artificial Sequence
  source: /note="Description of Artificial Sequence: Synthetic oligonucleotide"
uugggcuaauguagcauaau

SEQ ID NO: 2229 - RNA, 20 nt, Artificial Sequence
  source: /note="Description of Artificial Sequence: Synthetic oligonucleotide"
gcguuggcauuuguauagag

SEQ ID NO: 2230 - RNA, 19 nt, Artificial Sequence
  source: /note="Description of Artificial Sequence: Synthetic oligonucleotide"
ugggcuaaguagcauaaug

SEQ ID NO: 2231 - RNA, 20 nt, Artificial Sequence
  source: /note="Description of Artificial Sequence: Synthetic oligonucleotide"
uuugggcuaauguagcauaa

SEQ ID NO: 2232 - RNA, 20 nt, Artificial Sequence
  source: /note="Description of Artificial Sequence: Synthetic oligonucleotide"
gcuuaacuccuuaauauuaa

SEQ ID NO: 2233 - RNA, 20 nt, Artificial Sequence
  source: /note="Description of Artificial Sequence: Synthetic oligonucleotide"
ucuucuauauuaaagcagau

SEQ ID NO: 2234 - RNA, 20 nt, Artificial Sequence
  source: /note="Description of Artificial Sequence: Synthetic oligonucleotide"
cuucuauauuaaagcagauu

SEQ ID NO: 2235 - RNA, 20 nt, Artificial Sequence
  source: /note="Description of Artificial Sequence: Synthetic oligonucleotide"
aauauauaacuaccuugggu

SEQ ID NO: 2236 - RNA, 20 nt, Artificial Sequence
  source: /note="Description of Artificial Sequence: Synthetic oligonucleotide"
accuccauucuacucuuugg

SEQ ID NO: 2237 - RNA, 20 nt, Artificial Sequence
  source: /note="Description of Artificial Sequence: Synthetic oligonucleotide"
uuucaaugauauccaaccca

SEQ ID NO: 2238 - RNA, 20 nt, Artificial Sequence
  source: /note="Description of Artificial Sequence: Synthetic oligonucleotide"
aguaccuccauucuacucuu

SEQ ID NO: 2239 - RNA, 20 nt, Artificial Sequence
  source: /note="Description of Artificial Sequence: Synthetic oligonucleotide"
cuauccuccaaagaguagaa

SEQ ID NO: 2240 - RNA, 20 nt, Artificial Sequence
  source: /note="Description of Artificial Sequence: Synthetic oligonucleotide"
uuuugcuacauauuucaggc

SEQ ID NO: 2241 - RNA, 20 nt, Artificial Sequence
  source: /note="Description of Artificial Sequence: Synthetic oligonucleotide"
uuugcuacauauuucaggcu

SEQ ID NO: 2242 - RNA, 20 nt, Artificial Sequence
  source: /note="Description of Artificial Sequence: Synthetic oligonucleotide"
ggguuggauaucauugaaaa

SEQ ID NO: 2243 - RNA, 19 nt, Artificial Sequence
  source: /note="Description of Artificial Sequence: Synthetic oligonucleotide"
auauuucaggcuggguucu

SEQ ID NO: 2244 - RNA, 20 nt, Artificial Sequence
  source: /note="Description of Artificial Sequence: Synthetic oligonucleotide"
uugaaauauauaacuaccuu

SEQ ID NO: 2245 - RNA, 20 nt, Artificial Sequence
  source: /note="Description of Artificial Sequence: Synthetic oligonucleotide"
auugaaauauauaacuaccu

SEQ ID NO: 2246 - RNA, 20 nt, Artificial Sequence
  source: /note="Description of Artificial Sequence: Synthetic oligonucleotide"
gugaguaguggggcacuuua

SEQ ID NO: 2247 - RNA, 20 nt, Artificial Sequence
  source: /note="Description of Artificial Sequence: Synthetic oligonucleotide"
uguauguagaagguuaacua

SEQ ID NO: 2248 - RNA, 20 nt, Artificial Sequence
  source: /note="Description of Artificial Sequence: Synthetic oligonucleotide"
gagccuaauaaauguacaau

SEQ ID NO: 2249 - RNA, 20 nt, Artificial Sequence
  source: /note="Description of Artificial Sequence: Synthetic oligonucleotide"
uuguauguagaagguuaacu

SEQ ID NO: 2250 - RNA, 19 nt, Artificial Sequence
  source: /note="Description of Artificial Sequence: Synthetic oligonucleotide"
caauuuguuuugaguaacu

SEQ ID NO: 2251 - RNA, 20 nt, Artificial Sequence
  source: /note="Description of Artificial Sequence: Synthetic oligonucleotide"
ugccuucugaaauaguccag

SEQ ID NO: 2252 - RNA, 20 nt, Artificial Sequence
  source: /note="Description of Artificial Sequence: Synthetic oligonucleotide"
guuaauagggaaacagcaua

SEQ ID NO: 2253 - RNA, 20 nt, Artificial Sequence
  source: /note="Description of Artificial Sequence: Synthetic oligonucleotide"
aacaaugcagaguuaauugu

SEQ ID NO: 2254 - RNA, 20 nt, Artificial Sequence
  source: /note="Description of Artificial Sequence: Synthetic oligonucleotide"
gaacauguugaguagacaca

SEQ ID NO: 2255 - RNA, 20 nt, Artificial Sequence
  source: /note="Description of Artificial Sequence: Synthetic oligonucleotide"
uuuaucaucugugucuauuc

SEQ ID NO: 2256 - RNA, 20 nt, Artificial Sequence
  source: /note="Description of Artificial Sequence: Synthetic oligonucleotide"
ucuuuacuuucuugacuaua

SEQ ID NO: 2257 - RNA, 20 nt, Artificial Sequence
  source: /note="Description of Artificial Sequence: Synthetic oligonucleotide"
aauauucucaaaccucguuc

SEQ ID NO: 2258 - RNA, 20 nt, Artificial Sequence
  source: /note="Description of Artificial Sequence: Synthetic oligonucleotide"
auuaacuguguuccagaacg

SEQ ID NO: 2259 - RNA, 20 nt, Artificial Sequence
  source: /note="Description of Artificial Sequence: Synthetic oligonucleotide"
uaacugcuucuuuggaugac

SEQ ID NO: 2260 - RNA, 20 nt, Artificial Sequence
  source: /note="Description of Artificial Sequence: Synthetic oligonucleotide"
gaccagaacaguguaaguuu

SEQ ID NO: 2261 - RNA, 20 nt, Artificial Sequence
  source: /note="Description of Artificial Sequence: Synthetic oligonucleotide"
accagaacaguguaaguuua

SEQ ID NO: 2262 - RNA, 20 nt, Artificial Sequence
  source: /note="Description of Artificial Sequence: Synthetic oligonucleotide"
cuacuuuuuccccacuacug

SEQ ID NO: 2263 - RNA, 20 nt, Artificial Sequence
  source: /note="Description of Artificial Sequence: Synthetic oligonucleotide"
uggaacacaguuaauucacu

SEQ ID NO: 2264 - RNA, 20 nt, Artificial Sequence
  source: /note="Description of Artificial Sequence: Synthetic oligonucleotide"
guguuguuuaacugcuucuu

SEQ ID NO: 2265 - RNA, 20 nt, Artificial Sequence
  source: /note="Description of Artificial Sequence: Synthetic oligonucleotide"
aacugucaguugcauauucc

SEQ ID NO: 2266 - RNA, 20 nt, Artificial Sequence
  source: /note="Description of Artificial Sequence: Synthetic oligonucleotide"
cagaaaggaaugcugguacc

SEQ ID NO: 2267 - RNA, 20 nt, Artificial Sequence
  source: /note="Description of Artificial Sequence: Synthetic oligonucleotide"
ucugccuacacaaugaaugg

SEQ ID NO: 2268 - RNA, 20 nt, Artificial Sequence
  source: /note="Description of Artificial Sequence: Synthetic oligonucleotide"
cacagaucaauccaauuguu

SEQ ID NO: 2269 - RNA, 20 nt, Artificial Sequence
  source: /note="Description of Artificial Sequence: Synthetic oligonucleotide"
uugacagguggaaaguacau

SEQ ID NO: 2270 - RNA, 20 nt, Artificial Sequence
  source: /note="Description of Artificial Sequence: Synthetic oligonucleotide"
acauuuuuaggcuugacagg

SEQ ID NO: 2271 - RNA, 20 nt, Artificial Sequence
  source: /note="Description of Artificial Sequence: Synthetic oligonucleotide"
cucucccaugacagacuccc

SEQ ID NO: 2272 - RNA, 20 nt, Artificial Sequence
  source: /note="Description of Artificial Sequence: Synthetic oligonucleotide"
uugguaagaguuaugauaag

SEQ ID NO: 2273 - RNA, 20 nt, Artificial Sequence
  source: /note="Description of Artificial Sequence: Synthetic oligonucleotide"
aacacaaauuaaguucaccu

SEQ ID NO: 2274 - RNA, 20 nt, Artificial Sequence
  source: /note="Description of Artificial Sequence: Synthetic oligonucleotide"
aggaucagugcuguagugcc

SEQ ID NO: 2275 - RNA, 20 nt, Artificial Sequence
  source: /note="Description of Artificial Sequence: Synthetic oligonucleotide"
ggccguuuauuauuauugac

SEQ ID NO: 2276 - RNA, 20 nt, Artificial Sequence
  source: /note="Description of Artificial Sequence: Synthetic oligonucleotide"
ucucaggauugcuaugcaac

SEQ ID NO: 2277 - RNA, 20 nt, Artificial Sequence
  source: /note="Description of Artificial Sequence: Synthetic oligonucleotide"
caggaagacauaccauguaa

SEQ ID NO: 2278 - RNA, 20 nt, Artificial Sequence
  source: /note="Description of Artificial Sequence: Synthetic oligonucleotide"
agcagggcucuuucaguuuc

SEQ ID NO: 2279 - RNA, 20 nt, Artificial Sequence
  source: /note="Description of Artificial Sequence: Synthetic oligonucleotide"
uaacauuuucagcuugaacc

SEQ ID NO: 2280 - RNA, 20 nt, Artificial Sequence
  source: /note="Description of Artificial Sequence: Synthetic oligonucleotide"
ucaagcugaaaauguuacac

SEQ ID NO: 2281 - RNA, 20 nt, Artificial Sequence
  source: /note="Description of Artificial Sequence: Synthetic oligonucleotide"
guaacauuuucagcuugaac

SEQ ID NO: 2282 - RNA, 20 nt, Artificial Sequence
  source: /note="Description of Artificial Sequence: Synthetic oligonucleotide"
cagaaugaauuuuggagcac

SEQ ID NO: 2283 - RNA, 20 nt, Artificial Sequence
  source: /note="Description of Artificial Sequence: Synthetic oligonucleotide"
uuuauuauuauugacuggug

SEQ ID NO: 2284 - RNA, 20 nt, Artificial Sequence
  source: /note="Description of Artificial Sequence: Synthetic oligonucleotide"
agaagaaucugaccuuuaca

SEQ ID NO: 2285 - RNA, 20 nt, Artificial Sequence
  source: /note="Description of Artificial Sequence: Synthetic oligonucleotide"
gcagggcucuuucaguuucu

SEQ ID NO: 2286 - RNA, 20 nt, Artificial Sequence
  source: /note="Description of Artificial Sequence: Synthetic oligonucleotide"
cuaaacaguagccaggcgug

SEQ ID NO: 2287 - RNA, 20 nt, Artificial Sequence
  source: /note="Description of Artificial Sequence: Synthetic oligonucleotide"
cgccuggcuacuguuuagug

SEQ ID NO: 2288 - RNA, 20 nt, Artificial Sequence
  source: /note="Description of Artificial Sequence: Synthetic oligonucleotide"
cuccgcacuaaacaguagcc

SEQ ID NO: 2289 - RNA, 20 nt, Artificial Sequence
  source: /note="Description of Artificial Sequence: Synthetic oligonucleotide"
guagccaggcguguggaugu

SEQ ID NO: 2290 - RNA, 20 nt, Artificial Sequence
  source: /note="Description of Artificial Sequence: Synthetic oligonucleotide"
cuuggcuuugacuauucugc

SEQ ID NO: 2291 - RNA, 20 nt, Artificial Sequence
  source: /note="Description of Artificial Sequence: Synthetic oligonucleotide"
aguagccaggcguguggaug

SEQ ID NO: 2292 - RNA, 20 nt, Artificial Sequence
  source: /note="Description of Artificial Sequence: Synthetic oligonucleotide"
uccucccacauccacacgcc

SEQ ID NO: 2293 - RNA, 20 nt, Artificial Sequence
  source: /note="Description of Artificial Sequence: Synthetic oligonucleotide"
uuggcuuugacuauucugcu

SEQ ID NO: 2294 - RNA, 20 nt, Artificial Sequence
  source: /note="Description of Artificial Sequence: Synthetic oligonucleotide"
auaaugucucuggcuuguaa

SEQ ID NO: 2295 - RNA, 20 nt, Artificial Sequence
  source: /note="Description of Artificial Sequence: Synthetic oligonucleotide"
ugguacccggcagcucucug

SEQ ID NO: 2296 - RNA, 20 nt, Artificial Sequence
  source: /note="Description of Artificial Sequence: Synthetic oligonucleotide"
gugggaggaaccucaaagag

SEQ ID NO: 2297 - RNA, 20 nt, Artificial Sequence
  source: /note="Description of Artificial Sequence: Synthetic oligonucleotide"
ugacuauucugcugggaaca

SEQ ID NO: 2298 - RNA, 20 nt, Artificial Sequence
  source: /note="Description of Artificial Sequence: Synthetic oligonucleotide"
cucucugaggaauguucccu

SEQ ID NO: 2299 - RNA, 20 nt, Artificial Sequence
  source: /note="Description of Artificial Sequence: Synthetic oligonucleotide"
aacauuccucagagagcugc

SEQ ID NO: 2300 - RNA, 20 nt, Artificial Sequence
  source: /note="Description of Artificial Sequence: Synthetic oligonucleotide"
auucugaagcuccaaacaau

SEQ ID NO: 2301 - RNA, 20 nt, Artificial Sequence
  source: /note="Description of Artificial Sequence: Synthetic oligonucleotide"
uaaauuacucugcuaaagua

SEQ ID NO: 2302 - RNA, 20 nt, Artificial Sequence
  source: /note="Description of Artificial Sequence: Synthetic oligonucleotide"
aguacaaaccagguuuguac

SEQ ID NO: 2303 - RNA, 20 nt, Artificial Sequence
  source: /note="Description of Artificial Sequence: Synthetic oligonucleotide"
auauccuuccaguacaaacc

SEQ ID NO: 2304 - RNA, 20 nt, Artificial Sequence
  source: /note="Description of Artificial Sequence: Synthetic oligonucleotide"
caaaccagguuuguacugga

SEQ ID NO: 2305 - RNA, 20 nt, Artificial Sequence
  source: /note="Description of Artificial Sequence: Synthetic oligonucleotide"
ggcagcuaaagcaucacuga

SEQ ID NO: 2306 - RNA, 20 nt, Artificial Sequence
  source: /note="Description of Artificial Sequence: Synthetic oligonucleotide"
aucucugaguaguacaaacc

SEQ ID NO: 2307 - RNA, 20 nt, Artificial Sequence
  source: /note="Description of Artificial Sequence: Synthetic oligonucleotide"
gugucccauucucuuugacu

SEQ ID NO: 2308 - RNA, 20 nt, Artificial Sequence
  source: /note="Description of Artificial Sequence: Synthetic oligonucleotide"
ugugucccauucucuuugac

SEQ ID NO: 2309 - RNA, 20 nt, Artificial Sequence
  source: /note="Description of Artificial Sequence: Synthetic oligonucleotide"
uucugaauguugaacaagua

SEQ ID NO: 2310 - RNA, 20 nt, Artificial Sequence
  source: /note="Description of Artificial Sequence: Synthetic oligonucleotide"
gucucccagucaaagagaau

SEQ ID NO: 2311 - RNA, 20 nt, Artificial Sequence
  source: /note="Description of Artificial Sequence: Synthetic oligonucleotide"
auucucuuugacugggagac

SEQ ID NO: 2312 - RNA, 20 nt, Artificial Sequence
  source: /note="Description of Artificial Sequence: Synthetic oligonucleotide"
ucuuugacugggagacaggc

SEQ ID NO: 2313 - RNA, 20 nt, Artificial Sequence
  source: /note="Description of Artificial Sequence: Synthetic oligonucleotide"
gugguguccuuugaauaugc

SEQ ID NO: 2314 - RNA, 20 nt, Artificial Sequence
  source: /note="Description of Artificial Sequence: Synthetic oligonucleotide"
agauuguccaggauauaauu

SEQ ID NO: 2315 - RNA, 20 nt, Artificial Sequence
  source: /note="Description of Artificial Sequence: Synthetic oligonucleotide"
uuagcaaccaaauuauaucc

SEQ ID NO: 2316 - RNA, 20 nt, Artificial Sequence
  source: /note="Description of Artificial Sequence: Synthetic oligonucleotide"
guugaaauuaaacuacacac

SEQ ID NO: 2317 - RNA, 20 nt, Artificial Sequence
  source: /note="Description of Artificial Sequence: Synthetic oligonucleotide"
aucuuuaccugcauauucaa

SEQ ID NO: 2318 - RNA, 17 nt, Artificial Sequence
  source: /note="Description of Artificial Sequence: Synthetic oligonucleotide"
guguccuuugaauaugc

SEQ ID NO: 2319 - RNA, 17 nt, Artificial Sequence
  source: /note="Description of Artificial Sequence: Synthetic oligonucleotide"
uuguccaggauauaauu

SEQ ID NO: 2320 - RNA, 17 nt, Artificial Sequence
  source: /note="Description of Artificial Sequence: Synthetic oligonucleotide"
gcaaccaaauuauaucc

SEQ ID NO: 2321 - RNA, 17 nt, Artificial Sequence
  source: /note="Description of Artificial Sequence: Synthetic oligonucleotide"
gaaauuaaacuacacac

SEQ ID NO: 2322 - RNA, 17 nt, Artificial Sequence
  source: /note="Description of Artificial Sequence: Synthetic oligonucleotide"
uuuaccugcauauucaa

SEQ ID NO: 2323 - RNA, 20 nt, Artificial Sequence
  source: /note="Description of Artificial Sequence: Synthetic oligonucleotide"
uacacauuuuuaggcuugac

SEQ ID NO: 2324 - RNA, 20 nt, Artificial Sequence
  source: /note="Description of Artificial Sequence: Synthetic oligonucleotide"
cauuccugggagucugucau

SEQ ID NO: 2325 - RNA, 20 nt, Artificial Sequence
  source: /note="Description of Artificial Sequence: Synthetic oligonucleotide"
uguaugaugcuauaauacca

SEQ ID NO: 2326 - RNA, 20 nt, Artificial Sequence
  source: /note="Description of Artificial Sequence: Synthetic oligonucleotide"
guggaaaguacauaggaccu

SEQ ID NO: 2327 - RNA, 20 nt, Artificial Sequence
  source: /note="Description of Artificial Sequence: Synthetic oligonucleotide"
ucuuaucauaacucuuacca

SEQ ID NO: 2328 - RNA, 17 nt, Artificial Sequence
  source: /note="Description of Artificial Sequence: Synthetic oligonucleotide"
acauuuuuaggcuugac

SEQ ID NO: 2329 - RNA, 17 nt, Artificial Sequence
  source: /note="Description of Artificial Sequence: Synthetic oligonucleotide"
uccugggagucugucau

SEQ ID NO: 2330 - RNA, 17 nt, Artificial Sequence
  source: /note="Description of Artificial Sequence: Synthetic oligonucleotide"
augaugcuauaauacca

SEQ ID NO: 2331 - RNA, 17 nt, Artificial Sequence
  source: /note="Description of Artificial Sequence: Synthetic oligonucleotide"
gaaaguacauaggaccu

SEQ ID NO: 2332 - RNA, 17 nt, Artificial Sequence
  source: /note="Description of Artificial Sequence: Synthetic oligonucleotide"
uaucauaacucuuacca

SEQ ID NO: 2333 - DNA, 24 bp, Artificial Sequence
  source: /note="Description of Artificial Sequence: Synthetic oligonucleotide"
gagttcctactcagactgttactc

SEQ ID NO: 2334 - DNA, 26 bp, Artificial Sequence
  source: /note="Description of Artificial Sequence: Synthetic oligonucleotide"
gtgagttcctactcagactgttactc

SEQ ID NO: 2335 - DNA, 28 bp, Artificial Sequence
  source: /note="Description of Artificial Sequence: Synthetic oligonucleotide"
gtctgagttcctactcagactgttactc

SEQ ID NO: 2336 - DNA, 22 bp, Artificial Sequence
  source: /note="Description of Artificial Sequence: Synthetic oligonucleotide"
aaagatatataatgtcatgaat

SEQ ID NO: 2337 - DNA, 22 bp, Artificial Sequence
  source: /note="Description of Artificial Sequence: Synthetic oligonucleotide"
gcagaatcaaatataatagtct

SEQ ID NO: 2338 - DNA, 20 bp, Artificial Sequence
  source: /note="Description of Artificial Sequence: Synthetic oligonucleotide"
aacaaatatcccttagtatc

SEQ ID NO: 2339 - DNA, 20 bp, Artificial Sequence
  source: /note="Description of Artificial Sequence: Synthetic oligonucleotide"
aatgtatttcttctattcaa

SEQ ID NO: 2340 - DNA, 22 bp, Artificial Sequence
  source: /note="Description of Artificial Sequence: Synthetic oligonucleotide"
aacaataagtcaaatttaattg

SEQ ID NO: 2341 - DNA, 22 bp, Artificial Sequence
  source: /note="Description of Artificial Sequence: Synthetic oligonucleotide"
gaactggtgggaaatggtctag

SEQ ID NO: 2342 - DNA, 22 bp, Artificial Sequence
  source: /note="Description of Artificial Sequence: Synthetic oligonucleotide"
tcctttggtaaataaaagtcct

SEQ ID NO: 2343 - DNA, 22 bp, Artificial Sequence
  source: /note="Description of Artificial Sequence: Synthetic oligonucleotide"
taggaatcaaatggacttggat

SEQ ID NO: 2344 - DNA, 22 bp, Artificial Sequence
  source: /note="Description of Artificial Sequence: Synthetic oligonucleotide"
taattctttctagaaagagcct

SEQ ID NO: 2345 - DNA, 22 bp, Artificial Sequence
  source: /note="Description of Artificial Sequence: Synthetic oligonucleotide"
ctcttgcatcttgcacatgtcc

SEQ ID NO: 2346 - DNA, 22 bp, Artificial Sequence
  source: /note="Description of Artificial Sequence: Synthetic oligonucleotide"
acttagaggtcttctacataca

SEQ ID NO: 2347 - DNA, 22 bp, Artificial Sequence
  source: /note="Description of Artificial Sequence: Synthetic oligonucleotide"
tcagaggtgagtggtgagggga

SEQ ID NO: 2348 - DNA, 22 bp, Artificial Sequence
  source: /note="Description of Artificial Sequence: Synthetic oligonucleotide"
acacacagctgggttatcagag

SEQ ID NO: 2349 - DNA, 19 bp, Artificial Sequence
  source: /note="Description of Artificial Sequence: Synthetic oligonucleotide"
cacagctgggttatcagag

SEQ ID NO: 2350 - DNA, 20 bp, Artificial Sequence
  source: /note="Description of Artificial Sequence: Synthetic oligonucleotide"
acacagctgggttatcagag

SEQ ID NO: 2351 - DNA, 21 bp, Artificial Sequence
  source: /note="Description of Artificial Sequence: Synthetic oligonucleotide"
cacacagctgggttatcagag

SEQ ID NO: 2352 - DNA, 23 bp, Artificial Sequence
  source: /note="Description of Artificial Sequence: Synthetic oligonucleotide"
aacacacagctgggttatcagag

SEQ ID NO: 2353 - DNA, 19 bp, Artificial Sequence
  source: /note="Description of Artificial Sequence: Synthetic oligonucleotide"
ctgstgggaratggtctag

SEQ ID NO: 2354 - DNA, 20 bp, Artificial Sequence
  source: /note="Description of Artificial Sequence: Synthetic oligonucleotide"
actggtgggaaatggtctag

SEQ ID NO: 2355 - DNA, 21 bp, Artificial Sequence
  source: /note="Description of Artificial Sequence: Synthetic oligonucleotide"
aactggtgggaaatggtctag

SEQ ID NO: 2356 - DNA, 23 bp, Artificial Sequence
  source: /note="Description of Artificial Sequence: Synthetic oligonucleotide"
agaactggtgggaaatggtctag

SEQ ID NO: 2357 - DNA, 20 bp, Artificial Sequence
  source: /note="Description of Artificial Sequence: Synthetic oligonucleotide"
atatcttcttaaatacccga

SEQ ID NO: 2358 - DNA, 20 bp, Artificial Sequence
  source: /note="Description of Artificial Sequence: Synthetic oligonucleotide"
agtctcacaaaactgcagag

SEQ ID NO: 2359 - DNA, 20 bp, Artificial Sequence
  source: /note="Description of Artificial Sequence: Synthetic oligonucleotide"
tacttatgtattttaaaaac

SEQ ID NO: 2360 - DNA, 22 bp, Artificial Sequence
  source: /note="Description of Artificial Sequence: Synthetic oligonucleotide"
gaataatttctattatattaca

SEQ ID NO: 2361 - DNA, 22 bp, Artificial Sequence
  source: /note="Description of Artificial Sequence: Synthetic oligonucleotide"
ttcgaaaatttcaggtaagccg

SEQ ID NO: 2362 - DNA, 22 bp, Artificial Sequence
  source: /note="Description of Artificial Sequence: Synthetic oligonucleotide"
tcatttctaaaagtcttttgcc

SEQ ID NO: 2363 - DNA, 22 bp, Artificial Sequence
  source: /note="Description of Artificial Sequence: Synthetic oligonucleotide"
tttgagacacagtataggttat

SEQ ID NO: 2364 - DNA, 20 bp, Artificial Sequence
  source: /note="Description of Artificial Sequence: Synthetic oligonucleotide"
atataatagaaattattcat

SEQ ID NO: 2365 - DNA, 20 bp, Artificial Sequence
  source: /note="Description of Artificial Sequence: Synthetic oligonucleotide"
taatatgccctgtaatataa

SEQ ID NO: 2366 - DNA, 20 bp, Artificial Sequence
  source: /note="Description of Artificial Sequence: Synthetic oligonucleotide"
tgatatcatcaatatctttg

SEQ ID NO: 2367 - DNA, 20 bp, Artificial Sequence
  source: /note="Description of Artificial Sequence: Synthetic oligonucleotide"
gcaattaattggaaaatgtg

SEQ ID NO: 2368 - DNA, 21 bp, Artificial Sequence
  source: /note="Description of Artificial Sequence: Synthetic oligonucleotide"
ctttaagcttaggtaaaatca

SEQ ID NO: 2369 - DNA, 20 bp, Artificial Sequence
  source: /note="Description of Artificial Sequence: Synthetic oligonucleotide"
cagtaatgtgtcataccttc

SEQ ID NO: 2370 - DNA, 20 bp, Artificial Sequence
  source: /note="Description of Artificial Sequence: Synthetic oligonucleotide"
cagggcatattatatttaga

SEQ ID NO: 2371 - DNA, 20 bp, Artificial Sequence
  source: /note="Description of Artificial Sequence: Synthetic oligonucleotide"
caaaagccaaatctatttca

SEQ ID NO: 2372 - DNA, 26 bp, Artificial Sequence
  source: /note="Description of Artificial Sequence: Synthetic oligonucleotide"
atgctttggtgggaagaagtagagga

SEQ ID NO: 2373 - DNA, 26 bp, Artificial Sequence
  source: /note="Description of Artificial Sequence: Synthetic oligonucleotide"
atgctttggtgggaagaatagaggac

SEQ ID NO: 2374 - DNA, 23 bp, Artificial Sequence
  source: /note="Description of Artificial Sequence: Synthetic oligonucleotide"
ttgtgacaagctcactaattagg

SEQ ID NO: 2375 - DNA, 23 bp, Artificial Sequence
  source: /note="Description of Artificial Sequence: Synthetic oligonucleotide"
aagtttgaagaacttttaccagg

SEQ ID NO: 2376 - DNA, 23 bp, Artificial Sequence
  source: /note="Description of Artificial Sequence: Synthetic oligonucleotide"
aggcagcgataaaaaaaacctgg

SEQ ID NO: 2377 - DNA, 23 bp, Artificial Sequence
  source: /note="Description of Artificial Sequence: Synthetic oligonucleotide"
gctttggtgggaagaagtagagg

SEQ ID NO: 2378 - DNA, 23 bp, Artificial Sequence
  source: /note="Description of Artificial Sequence: Synthetic oligonucleotide"
tgcaaaaacccaaaatattttag

SEQ ID NO: 2379 - DNA, 23 bp, Artificial Sequence
  source: /note="Description of Artificial Sequence: Synthetic oligonucleotide"
aaaatattttagctcctactcag

SEQ ID NO: 2380 - DNA, 23 bp, Artificial Sequence
  source: /note="Description of Artificial Sequence: Synthetic oligonucleotide"
cagagtaacagtctgagtaggag

SEQ ID NO: 2381 - DNA, 23 bp, Artificial Sequence
  source: /note="Description of Artificial Sequence: Synthetic oligonucleotide"
ttgcctttttggtatcttacagg

SEQ ID NO: 2382 - DNA, 23 bp, Artificial Sequence
  source: /note="Description of Artificial Sequence: Synthetic oligonucleotide"
tttgcctttttggtatcttacag

SEQ ID NO: 2383 - DNA, 23 bp, Artificial Sequence
  source: /note="Description of Artificial Sequence: Synthetic oligonucleotide"
cgctgcccaatgccatcctggag

SEQ ID NO: 2384 - DNA, 22 bp, Artificial Sequence
  source: /note="Description of Artificial Sequence: Synthetic oligonucleotide"
atttatttttcctttattctag

SEQ ID NO: 2385 - DNA, 23 bp, Artificial Sequence
  source: /note="Description of Artificial Sequence: Synthetic oligonucleotide"
tttccttttattctagttgaaag

SEQ ID NO: 2386 - DNA, 23 bp, Artificial Sequence
  source: /note="Description of Artificial Sequence: Synthetic oligonucleotide"
tgattctgaattctttcaactag

SEQ ID NO: 2387 - DNA, 23 bp, Artificial Sequence
  source: /note="Description of Artificial Sequence: Synthetic oligonucleotide"
atccatatgcttttacctgcagg

SEQ ID NO: 2388 - DNA, 23 bp, Artificial Sequence
  source: /note="Description of Artificial Sequence: Synthetic oligonucleotide"
gatccatatgcttttacctgcag

SEQ ID NO: 2389 - DNA, 23 bp, Artificial Sequence
  source: /note="Description of Artificial Sequence: Synthetic oligonucleotide"
cagatctgtcaaatcgcctgcag

SEQ ID NO: 2390 - DNA, 23 bp, Artificial Sequence
  source: /note="Description of Artificial Sequence: Synthetic oligonucleotide"
ttattcttctttctccaggctag

SEQ ID NO: 2391 - DNA, 23 bp, Artificial Sequence
  source: /note="Description of Artificial Sequence: Synthetic oligonucleotide"
aattttattcttctttctccagg

SEQ ID NO: 2392 - DNA, 23 bp, Artificial Sequence
  source: /note="Description of Artificial Sequence: Synthetic oligonucleotide"
caattttattcttctttctccag

SEQ ID NO: 2393 - DNA, 23 bp, Artificial Sequence
  source: /note="Description of Artificial Sequence: Synthetic oligonucleotide"
taagggatatttgttcttacagg

SEQ ID NO: 2394 - DNA, 23 bp, Artificial Sequence
  source: /note="Description of Artificial Sequence: Synthetic oligonucleotide"
ctaagggatatttgttcttacag

SEQ ID NO: 2395 - DNA, 23 bp, Artificial Sequence
  source: /note="Description of Artificial Sequence: Synthetic oligonucleotide"
tgttcttacaggcaacaatgcag

SEQ ID NO: 2396 - DNA, 23 bp, Artificial Sequence
  source: /note="Description of Artificial Sequence: Synthetic oligonucleotide"
tgtatgcttttctgttaaagagg

SEQ ID NO: 2397 - DNA, 23 bp, Artificial Sequence
  source: /note="Description of Artificial Sequence: Synthetic oligonucleotide"
atgtgtatgcttttctgttaaag

SEQ ID NO: 2398 - DNA, 23 bp, Artificial Sequence
  source: /note="Description of Artificial Sequence: Synthetic oligonucleotide"
gtgtatgcttttctgttaaagag

SEQ ID NO: 2399 - DNA, 23 bp, Artificial Sequence
  source: /note="Description of Artificial Sequence: Synthetic oligonucleotide"
gttttaaaatttttatattacag

SEQ ID NO: 2400 - DNA, 23 bp, Artificial Sequence
  source: /note="Description of Artificial Sequence: Synthetic oligonucleotide"
ttttatattacagaatataaaag

SEQ ID NO: 2401 - DNA, 23 bp, Artificial Sequence
  source: /note="Description of Artificial Sequence: Synthetic oligonucleotide"
atattacagaatataaaagatag

SEQ ID NO: 2402 - DNA, 23 bp, Artificial Sequence
  source: /note="Description of Artificial Sequence: Synthetic oligonucleotide"
tgaaaatttatttccacatgtag

SEQ ID NO: 2403 - DNA, 23 bp, Artificial Sequence
  source: /note="Description of Artificial Sequence: Synthetic oligonucleotide"
gaaaatttatttccacatgtagg

SEQ ID NO: 2404 - DNA, 23 bp, Artificial Sequence
  source: /note="Description of Artificial Sequence: Synthetic oligonucleotide"
ttacatttttgacctacatgtgg

SEQ ID NO: 2405 - DNA, 23 bp, Artificial Sequence
  source: /note="Description of Artificial Sequence: Synthetic oligonucleotide"
tgtgtatgtgtatgtgttttagg

SEQ ID NO: 2406 - DNA, 23 bp, Artificial Sequence
  source: /note="Description of Artificial Sequence: Synthetic oligonucleotide"
tatgtgtatgtgttttaggccag

SEQ ID NO: 2407 - DNA, 23 bp, Artificial Sequence
  source: /note="Description of Artificial Sequence: Synthetic oligonucleotide"
ctattccagtcaaataggtctgg

SEQ ID NO: 2408 - DNA, 23 bp, Artificial Sequence
  source: /note="Description of Artificial Sequence: Synthetic oligonucleotide"
gtgtagtgttaatgtgcttacag

SEQ ID NO: 2409 - DNA, 23 bp, Artificial Sequence
  source: /note="Description of Artificial Sequence: Synthetic oligonucleotide"
ggacttcttatctggataggtgg

SEQ ID NO: 2410 - DNA, 23 bp, Artificial Sequence
  source: /note="Description of Artificial Sequence: Synthetic oligonucleotide"
taggtggtatcaacatctgtaag

SEQ ID NO: 2411 - DNA, 23 bp, Artificial Sequence
  source: /note="Description of Artificial Sequence: Synthetic oligonucleotide"
tgaacatttggtcctttgcaggg

SEQ ID NO: 2412 - DNA, 23 bp, Artificial Sequence
  source: /note="Description of Artificial Sequence: Synthetic oligonucleotide"
tctgaacatttggtcctttgcag

SEQ ID NO: 2413 - DNA, 23 bp, Artificial Sequence
  source: /note="Description of Artificial Sequence: Synthetic oligonucleotide"
tctcgctcactcaccctgcaaag

SEQ ID NO: 2414 - DNA, 23 bp, Artificial Sequence
  source: /note="Description of Artificial Sequence: Synthetic oligonucleotide"
aaagaaaatcacagaaaccaagg

SEQ ID NO: 2415 - DNA, 23 bp, Artificial Sequence
  source: /note="Description of Artificial Sequence: Synthetic oligonucleotide"
aaaatcacagaaaccaaggttag

SEQ ID NO: 2416 - DNA, 23 bp, Artificial Sequence
  source: /note="Description of Artificial Sequence: Synthetic oligonucleotide"
ggtatctttgatactaaccttgg

SEQ ID NO: 2417 - DNA, 23 bp, Artificial Sequence
  source: /note="Description of Artificial Sequence: Synthetic oligonucleotide"
gtaatacaaatggtatcttaagg

SEQ ID NO: 2418 - DNA, 23 bp, Artificial Sequence
  source: /note="Description of Artificial Sequence: Synthetic oligonucleotide"
tatgtgttacctacccttgtcgg

SEQ ID NO: 2419 - DNA, 23 bp, Artificial Sequence
  source: /note="Description of Artificial Sequence: Synthetic oligonucleotide"
aaatgtacaaggaccgacaaggg

SEQ ID NO: 2420 - DNA, 23 bp, Artificial Sequence
  source: /note="Description of Artificial Sequence: Synthetic oligonucleotide"
gtacaaggaccgacaagggtagg

SEQ ID NO: 2421 - DNA, 23 bp, Artificial Sequence
  source: /note="Description of Artificial Sequence: Synthetic oligonucleotide"
atgctctcatccatagtcatagg

SEQ ID NO: 2422 - DNA, 23 bp, Artificial Sequence
  source: /note="Description of Artificial Sequence: Synthetic oligonucleotide"
tctcatccatagtcataggtaag

SEQ ID NO: 2423 - DNA, 23 bp, Artificial Sequence
  source: /note="Description of Artificial Sequence: Synthetic oligonucleotide"
catccatagtcataggtaagaag

SEQ ID NO: 2424 - DNA, 23 bp, Artificial Sequence
  source: /note="Description of Artificial Sequence: Synthetic oligonucleotide"
tgcactattctcaacaggtaaag

SEQ ID NO: 2425 - DNA, 23 bp, Artificial Sequence
  source: /note="Description of Artificial Sequence: Synthetic oligonucleotide"
tcaaatgcactattctcaacagg

SEQ ID NO: 2426 - DNA, 23 bp, Artificial Sequence
  source: /note="Description of Artificial Sequence: Synthetic oligonucleotide"
ctttacacactttacctgttgag

SEQ ID NO: 2427 - DNA, 18 bp, Artificial Sequence
  source: /note="Description of Artificial Sequence: Synthetic primer"
ttccctggcaaggtctga

SEQ ID NO: 2428 - DNA, 19 bp, Artificial Sequence
  source: /note="Description of Artificial Sequence: Synthetic primer"
atcctcaaggtcacccacc

SEQ ID NO: 2429 - DNA, 24 bp, Artificial Sequence
  source: /note="Description of Artificial Sequence: Synthetic primer"
gtctttctgtcttgtatcctttgg

SEQ ID NO: 2430 - DNA, 20 bp, Artificial Sequence
  source: /note="Description of Artificial Sequence: Synthetic primer"
aatgttagtgcctttcaccc

SEQ ID NO: 2431 - DNA, 20 bp, Artificial Sequence
  source: /note="Description of Artificial Sequence: Synthetic primer"
gggaaatcaggctgatgggt

SEQ ID NO: 2432 - DNA, 19 bp, Artificial Sequence
  source: /note="Description of Artificial Sequence: Synthetic primer"
gtctactgttcatttcagc

SEQ ID NO: 2433 - DNA, 19 bp, Artificial Sequence
  source: /note="Description of Artificial Sequence: Synthetic primer"
gcaggaaactatcagagtg

SEQ ID NO: 2434 - DNA, 18 bp, Artificial Sequence
  source: /note="Description of Artificial Sequence: Synthetic primer"
acaccttgctgttacgat

SEQ ID NO: 2435 - DNA, 18 bp, Artificial Sequence
  source: /note="Description of Artificial Sequence: Synthetic primer"
ccaccaaacctggcaaat

SEQ ID NO: 2436 - DNA, 25 bp, Artificial Sequence
  source: /note="Description of Artificial Sequence: Synthetic primer"
gaactatgaataacctaatgggcag

SEQ ID NO: 2437 - DNA, 22 bp, Artificial Sequence
  source: /note="Description of Artificial Sequence: Synthetic primer"
ttcttactcaaggcattcagac

SEQ ID NO: 2438 - DNA, 19 bp, Artificial Sequence
  source: /note="Description of Artificial Sequence: Synthetic primer"
ggtcaccacacccatcaat

SEQ ID NO: 2439 - DNA, 18 bp, Artificial Sequence
  source: /note="Description of Artificial Sequence: Synthetic primer"
tgcctggagaaagggttt

SEQ ID NO: 2440 - DNA, 22 bp, Artificial Sequence
  source: /note="Description of Artificial Sequence: Synthetic primer"
gcacagtcaataacacaaaggt

SEQ ID NO: 2441 - DNA, 22 bp, Artificial Sequence
  source: /note="Description of Artificial Sequence: Synthetic primer"
agcgatccactctctcaggatg

SEQ ID NO: 2442 - DNA, 28 bp, Artificial Sequence
  source: /note="Description of Artificial Sequence: Synthetic primer"
gcacctcaatgccccaatctgatttacg

SEQ ID NO: 2443 - DNA, 22 bp, Artificial Sequence
  source: /note="Description of Artificial Sequence: Synthetic primer"
gggtctaatatggcagaatcca

SEQ ID NO: 2444 - DNA, 24 bp, Artificial Sequence
  source: /note="Description of Artificial Sequence: Synthetic primer"
gttgtaaagtaggacatgatctgg

SEQ ID NO: 2445 - DNA, 19 bp, Artificial Sequence
  source: /note="Description of Artificial Sequence: Synthetic primer"
aggactatgggcattggtt

SEQ ID NO: 2446 - DNA, 25 bp, Artificial Sequence
  source: /note="Description of Artificial Sequence: Synthetic primer"
gtgtagaaatgacaagtctcagatg

SEQ ID NO: 2447 - DNA, 26 bp, Artificial Sequence
  source: /note="Description of Artificial Sequence: Synthetic primer"
gaaagctactctgttagatgggctag

SEQ ID NO: 2448 - DNA, 21 bp, Artificial Sequence
  source: /note="Description of Artificial Sequence: Synthetic primer"
ggctttgtatatatacacgtg

SEQ ID NO: 2449 - DNA, 19 bp, Artificial Sequence
  source: /note="Description of Artificial Sequence: Synthetic primer"
gcagcatcaaagacaagca

SEQ ID NO: 2450 - DNA, 18 bp, Artificial Sequence
  source: /note="Description of Artificial Sequence: Synthetic primer"
tccttacgggtagcatcc

SEQ ID NO: 2451 - DNA, 25 bp, Artificial Sequence
  source: /note="Description of Artificial Sequence: Synthetic primer"
cccagaagagcaagataaacttgaa

SEQ ID NO: 2452 - DNA, 23 bp, Artificial Sequence
  source: /note="Description of Artificial Sequence: Synthetic primer"
ctctgttccaaatcctgcattgt

SEQ ID NO: 2453 - DNA, 24 bp, Artificial Sequence
  source: /note="Description of Artificial Sequence: Synthetic primer"
caagaccagcaatcaagaggctag

SEQ ID NO: 2454 - DNA, 25 bp, Artificial Sequence
  source: /note="Description of Artificial Sequence: Synthetic primer"
tcatgtggacttttctggtatcatc

SEQ ID NO: 2455 - DNA, 20 bp, Artificial Sequence
  source: /note="Description of Artificial Sequence: Synthetic primer"
gaactccaggatggcattgg

SEQ ID NO: 2456 - DNA, 23 bp, Artificial Sequence
  source: /note="Description of Artificial Sequence: Synthetic primer"
ctctgttccaaatcctgcattgt

SEQ ID NO: 2457 - DNA, 25 bp, Artificial Sequence
  source: /note="Description of Artificial Sequence: Synthetic primer"
gaaactgccatctccaaactagaaa

SEQ ID NO: 2458 - DNA, 25 bp, Artificial Sequence
  source: /note="Description of Artificial Sequence: Synthetic primer"
ttctccaagaggcattgatattctc

SEQ ID NO: 2459 - DNA, 25 bp, Artificial Sequence
  source: /note="Description of Artificial Sequence: Synthetic primer"
cccagaagagcaagataaacttgaa

SEQ ID NO: 2460 - DNA, 23 bp, Artificial Sequence
  source: /note="Description of Artificial Sequence: Synthetic primer"
ctctgttccaaatcctgcattgt

SEQ ID NO: 2461 - DNA, 24 bp, Artificial Sequence
  source: /note="Description of Artificial Sequence: Synthetic primer"
caagaccagcaatcaagaggctag

SEQ ID NO: 2462 - DNA, 23 bp, Artificial Sequence
  source: /note="Description of Artificial Sequence: Synthetic primer"
gagagactttttccgaagttcac

SEQ ID NO: 2463 - DNA, 18 bp, Artificial Sequence
  source: /note="Description of Artificial Sequence: Synthetic primer"
ttccctggcaaggtctga

SEQ ID NO: 2464 - DNA, 19 bp, Artificial Sequence
  source: /note="Description of Artificial Sequence: Synthetic primer"
atcctcaaggtcacccacc

SEQ ID NO: 2465 - DNA, 26 bp, Artificial Sequence
  source: /note="Description of Artificial Sequence: Synthetic primer"
cacacctgttatatttttccgtgaag

SEQ ID NO: 2466 - DNA, 26 bp, Artificial Sequence
  source: /note="Description of Artificial Sequence: Synthetic primer"
caaaggagaagcaaaaacacattcta

SEQ ID NO: 2467 - DNA, 31 bp, Artificial Sequence
  source: /note="Description of Artificial Sequence: Synthetic primer"
gtaatgtataactgtataacgtggggcactc

SEQ ID NO: 2468 - DNA, 25 bp, Artificial Sequence
  source: /note="Description of Artificial Sequence: Synthetic primer"
ggtgagttgttgctacagctcttcc

SEQ ID NO: 2469 - DNA, 25 bp, Artificial Sequence
  source: /note="Description of Artificial Sequence: Synthetic primer"
cccagaagagcaagataaacttgaa

SEQ ID NO: 2470 - DNA, 23 bp, Artificial Sequence
  source: /note="Description of Artificial Sequence: Synthetic primer"
ctctgttccaaatcctgcattgt

SEQ ID NO: 2471 - DNA, 25 bp, Artificial Sequence
  source: /note="Description of Artificial Sequence: Synthetic primer"
cataagcccagaagagcaagataaa

SEQ ID NO: 2472 - DNA, 25 bp, Artificial Sequence
  source: /note="Description of Artificial Sequence: Synthetic primer"
ataggagataaccacagcagcagat

SEQ ID NO: 2473 - DNA, 20 bp, Artificial Sequence
  source: /note="Description of Artificial Sequence: Synthetic primer"
gggaaaaattgaacctgcac

SEQ ID NO: 2474 - DNA, 21 bp, Artificial Sequence
  source: /note="Description of Artificial Sequence: Synthetic primer"
catcagctcttttactccctt

SEQ ID NO: 2475 - DNA, 20 bp, Artificial Sequence
  source: /note="Description of Artificial Sequence: Synthetic primer"
ggagggtccctatacagtag

SEQ ID NO: 2476 - protein, 11 aa, Homo sapiens
MLWWEEVEDCY

SEQ ID NO: 2477 - protein, 7 aa, Homo sapiens
MSEVSSD

SEQ ID NO: 2478 - protein, 16 aa, Homo sapiens
MTEIILLIFFPAYFLN

SEQ ID NO: 2479 - protein, 13 aa, Homo sapiens
MSARKLRNLSYKK

SEQ ID NO: 2480 - protein, 10 aa, Homo sapiens
MLHRKTYHVK

SEQ ID NO: 2481 - DNA, 21 bp, Artificial Sequence
  source: /note="Description of Artificial Sequence: Synthetic oligonucleotide"
atattttagctcctactcaga

SEQ ID NO: 2482 - DNA, 11 bp, Artificial Sequence
  source: /note="Description of Artificial Sequence: Synthetic oligonucleotide"
ccccacaggtc

SEQ ID NO: 2483 - DNA, 20 bp, Artificial Sequence
  source: /note="Description of Artificial Sequence: Synthetic oligonucleotide"
ctggctccacccttgacctg

SEQ ID NO: 2484 - DNA, 20 bp, Artificial Sequence
  source: /note="Description of Artificial Sequence: Synthetic oligonucleotide"
tgaattatggtaatccccac

SEQ ID NO: 2485 - DNA, 20 bp, Artificial Sequence
  source: /note="Description of Artificial Sequence: Synthetic oligonucleotide"
ttgtctttgatgctgctctg

SEQ ID NO: 2486 - DNA, 20 bp, Artificial Sequence
  source: /note="Description of Artificial Sequence: Synthetic oligonucleotide"
atcaaagacaagcatggtac

SEQ ID NO: 2487 - DNA, 20 bp, Artificial Sequence
  source: /note="Description of Artificial Sequence: Synthetic oligonucleotide"
gaaacctcctctgtggagag

SEQ ID NO: 2488 - DNA, 40 bp, Homo sapiens
aaaaacccaaaatattttagctcctactcagactgttact

SEQ ID NO: 2489 - DNA, 19 bp, Artificial Sequence
  source: /note="Description of Artificial Sequence: Synthetic oligonucleotide"
aaaaacccaaaatattact

SEQ ID NO: 2490 - DNA, 26 bp, Artificial Sequence
  source: /note="Description of Artificial Sequence: Synthetic oligonucleotide"
aaaaacccaaaatattttagctccta

SEQ ID NO: 2491 - DNA, 36 bp, Artificial Sequence
  source: /note="Description of Artificial Sequence: Synthetic oligonucleotide"
aaaaacccaaaatattttagctcctagactgttact

SEQ ID NO: 2492 - DNA, 37 bp, Artificial Sequence
  source: /note="Description of Artificial Sequence: Synthetic oligonucleotide"
aaaaacccaaaatattttagctcctcagactgttact

SEQ ID NO: 2493 - DNA, 40 bp, Homo sapiens
gcctttttggtatcttacaggaactccaggatggcattgg

SEQ ID NO: 2494 - DNA, 16 bp, Artificial Sequence
  source: /note="Description of Artificial Sequence: Synthetic oligonucleotide"
gcctttttggcattgg

SEQ ID NO: 2495 - DNA, 26 bp, Artificial Sequence
  source: /note="Description of Artificial Sequence: Synthetic oligonucleotide"
gcctttttggtatcttacaggaatgg

SEQ ID NO: 2496 - DNA, 32 bp, Artificial Sequence
  source: /note="Description of Artificial Sequence: Synthetic oligonucleotide"
gcctttttggtatcttacaggaactgcattgg

SEQ ID NO: 2497 - DNA, 25 bp, Artificial Sequence
  source: /note="Description of Artificial Sequence: Synthetic oligonucleotide"
gcctttttggtatcttacaggaact

SEQ ID NO: 2498 - DNA, 40 bp, Homo sapiens
agaaaatcacagaaaccaaggttagtatcaaagatacctt

SEQ ID NO: 2499 - DNA, 38 bp, Artificial Sequence
  source: /note="Description of Artificial Sequence: Synthetic oligonucleotide"
agaaaatcacagaaaccaattagtatcaaagatacctt

SEQ ID NO: 2500 - DNA, 35 bp, Artificial Sequence
  source: /note="Description of Artificial Sequence: Synthetic oligonucleotide"
agaaaatcacagaaacttagtatcaaagatacctt

SEQ ID NO: 2501 - DNA, 28 bp, Artificial Sequence
  source: /note="Description of Artificial Sequence: Synthetic oligonucleotide"
agaaaatcacagaaaccaaagatacctt

SEQ ID NO: 2502 - DNA, 31 bp, Artificial Sequence
  source: /note="Description of Artificial Sequence: Synthetic oligonucleotide"
agaaaatcacagaaaccaaggaagatacctt

SEQ ID NO: 2503 - DNA, 40 bp, Homo sapiens
ccatatgcttttacctgcaggcgatttgacagatctgttg

SEQ ID NO: 2504 - DNA, 33 bp, Artificial Sequence
  source: /note="Description of Artificial Sequence: Synthetic oligonucleotide"
ccatatgcttttaccgatttgacagatctgttg

SEQ ID NO: 2505 - DNA, 32 bp, Artificial Sequence
  source: /note="Description of Artificial Sequence: Synthetic oligonucleotide"
ccatacctgcaggcgatttgacagatctgttg

SEQ ID NO: 2506 - DNA, 32 bp, Artificial Sequence
  source: /note="Description of Artificial Sequence: Synthetic oligonucleotide"
ccatatctgcaggcgatttgacagatctgttg

SEQ ID NO: 2507 - DNA, 39 bp, Artificial Sequence
  source: /note="Description of Artificial Sequence: Synthetic oligonucleotide"
ccatatgcttttactgcaggcgatttgacagatctgttg

SEQ ID NO: 2508 - DNA, 40 bp, Homo sapiens
ttttattcttctttctccaggctagaagaacaaaagaata

SEQ ID NO: 2509 - DNA, 10 bp, Artificial Sequence
  source: /note="Description of Artificial Sequence: Synthetic oligonucleotide"
ttttattctt

SEQ ID NO: 2510 - DNA, 23 bp, Artificial Sequence
  source: /note="Description of Artificial Sequence: Synthetic oligonucleotide"
caggctagaagaacaaaagaata

SEQ ID NO: 2511 - DNA, 31 bp, Artificial Sequence
  source: /note="Description of Artificial Sequence: Synthetic oligonucleotide"
ttttattccaggctagaagaacaaaagaata

SEQ ID NO: 2512 - DNA, 40 bp, Homo sapiens
agggatatttgttcttacaggcaacaatgcaggatttgga

SEQ ID NO: 2513 - DNA, 22 bp, Artificial Sequence
  source: /note="Description of Artificial Sequence: Synthetic oligonucleotide"
aggcaacaatgcaggatttgga

SEQ ID NO: 2514 - DNA, 31 bp, Artificial Sequence
  source: /note="Description of Artificial Sequence: Synthetic oligonucleotide"
agggatatttgttcacaatgcaggatttgga

SEQ ID NO: 2515 - DNA, 30 bp, Artificial Sequence
  source: /note="Description of Artificial Sequence: Synthetic oligonucleotide"
agggatacaggcaacaatgcaggatttgga

SEQ ID NO: 2516 - DNA, 28 bp, Artificial Sequence
  source: /note="Description of Artificial Sequence: Synthetic oligonucleotide"
agggataggcaacaatgcaggatttgga

SEQ ID NO: 2517 - DNA, 40 bp, Homo sapiens
tgtatgcttttctgttaaagaggaagttagaagatctgag

SEQ ID NO: 2518 - DNA, 34 bp, Artificial Sequence
  source: /note="Description of Artificial Sequence: Synthetic oligonucleotide"
tgtatgcttttctgtggaagttagaagatctgag

SEQ ID NO: 2519 - DNA, 38 bp, Artificial Sequence
  source: /note="Description of Artificial Sequence: Synthetic oligonucleotide"
tgtatgcttttctgttagaggaagttagaagatctgag

SEQ ID NO: 2520 - DNA, 29 bp, Artificial Sequence
  source: /note="Description of Artificial Sequence: Synthetic oligonucleotide"
tgtatgcttttctgttaagaagatctgag

SEQ ID NO: 2521 - DNA, 28 bp, Artificial Sequence
  source: /note="Description of Artificial Sequence: Synthetic oligonucleotide"
tgtatgcttttctgttagaagatctgag

SEQ ID NO: 2522 - DNA, 40 bp, Homo sapiens
atgtacaaggaccgacaagggtaggtaacacatatatttt

SEQ ID NO: 2523 - DNA, 30 bp, Artificial Sequence
  source: /note="Description of Artificial Sequence: Synthetic oligonucleotide"
atgtacaaggaccgacaacacatatatttt

SEQ ID NO: 2524 - DNA, 24 bp, Artificial Sequence
  source: /note="Description of Artificial Sequence: Synthetic oligonucleotide"
atgtacaaggaccgacaatatttt

SEQ ID NO: 2525 - DNA, 39 bp, Artificial Sequence
  source: /note="Description of Artificial Sequence: Synthetic oligonucleotide"
atgtacaaggaccgacagggtaggtaacacatatatttt

SEQ ID NO: 2526 - DNA, 29 bp, Artificial Sequence
  source: /note="Description of Artificial Sequence: Synthetic oligonucleotide"
atgtacaaggtaggtaacacatatatttt

SEQ ID NO: 2527 - DNA, 40 bp, Homo sapiens
gctctcatccatagtcataggtaagaagattactgagaca

SEQ ID NO: 2528 - DNA, 34 bp, Artificial Sequence
  source: /note="Description of Artificial Sequence: Synthetic oligonucleotide"
gctctcatccataggtaagaagattactgagaca

SEQ ID NO: 2529 - DNA, 34 bp, Artificial Sequence; identical to SEQ ID NO: 2528
  source: /note="Description of Artificial Sequence: Synthetic oligonucleotide"

SEQ ID NO: 2530 - DNA, 34 bp, Artificial Sequence; identical to SEQ ID NO: 2528
  source: /note="Description of Artificial Sequence: Synthetic oligonucleotide"

SEQ ID NO: 2531 - DNA, 34 bp, Artificial Sequence; identical to SEQ ID NO: 2528
  source: /note="Description of Artificial Sequence: Synthetic oligonucleotide"

SEQ ID NO: 2532 - DNA, 40 bp, Homo sapiens
tgtatgtgtatgtgttttaggccagacctatttgactgga

SEQ ID NO: 2533 - DNA, 12 bp, Artificial Sequence
  source: /note="Description of Artificial Sequence: Synthetic oligonucleotide"
tgtatgtgtgga

SEQ ID NO: 2534 - DNA, 35 bp, Artificial Sequence
  source: /note="Description of Artificial Sequence: Synthetic oligonucleotide"
tgtatgtgtatgtgttttaggcctatttgactgga

SEQ ID NO: 2535 - DNA, 38 bp, Artificial Sequence
  source: /note="Description of Artificial Sequence: Synthetic oligonucleotide"
tgtatgtgtatgtgttttaggccagacatttgactgga

SEQ ID NO: 2536 - DNA, 39 bp, Artificial Sequence
  source: /note="Description of Artificial Sequence: Synthetic oligonucleotide"
tgtatgtgtatgtgttttaggccagactatttgactgga

SEQ ID NO: 2537 - DNA, 40 bp, Homo sapiens
aaatgcactattctcaacaggtaaagtgtgtaaaggacag

SEQ ID NO: 2538 - DNA, 40 bp, Artificial Sequence
  source: /note="Description of Artificial Sequence: Synthetic oligonucleotide"
aaatgcactattctttacacataaagtgtgtaaaggacag

SEQ ID NO: 2539 - DNA, 37 bp, Artificial Sequence
  source: /note="Description of Artificial Sequence: Synthetic oligonucleotide"
aaatgcactattctcaggtaaagtgtgtaaaggacag

SEQ ID NO: 2540 - DNA, 38 bp, Artificial Sequence
  source: /note="Description of Artificial Sequence: Synthetic oligonucleotide"
aaatgcactattctccaggtaaagtgtgtaaaggacag

SEQ ID NO: 2541 - DNA, 38 bp, Artificial Sequence
  source: /note="Description of Artificial Sequence: Synthetic oligonucleotide"
aaatgcactattcaacaggtaaagtgtgtaaaggacag

SEQ ID NO: 2542 - DNA, 40 bp, Homo sapiens
gaacatttggtcctttgcagggtgagtgagcgagaggctg

SEQ ID NO: 2543 - DNA, 28 bp, Artificial Sequence
  source: /note="Description of Artificial Sequence: Synthetic oligonucleotide"
gaacatttggtgagtgagcgagaggctg

SEQ ID NO: 2544 - DNA, 17 bp, Artificial Sequence
  source: /note="Description of Artificial Sequence: Synthetic oligonucleotide"
gaacatttggtcctttg

SEQ ID NO: 2545 - DNA, 14 bp, Artificial Sequence
  source: /note="Description of Artificial Sequence: Synthetic oligonucleotide"
tgagcgagaggctg

SEQ ID NO: 2546 - DNA, 35 bp, Artificial Sequence
  source: /note="Description of Artificial Sequence: Synthetic oligonucleotide"
gaacatttggtcctttgcaagtgagcgagaggctg

SEQ ID NO: 2547 - DNA, 12 bp, Artificial Sequence
  source: /note="Description of Artificial Sequence: Synthetic oligonucleotide"
gagcctgcaaca

SEQ ID NO: 2548 - DNA, 12 bp, Artificial Sequence
  source: /note="Description of Artificial Sequence: Synthetic oligonucleotide"
atcgaacagttg

SEQ ID NO: 2549 - DNA, 12 bp, Artificial Sequence
  source: /note="Description of Artificial Sequence: Synthetic oligonucleotide"
aaagagttactg

SEQ ID NO: 2550 - DNA, 12 bp, Artificial Sequence
  source: /note="Description of Artificial Sequence: Synthetic oligonucleotide"
cagaagttgaaa

SEQ ID NO: 2551 - DNA, 12 bp, Artificial Sequence
  source: /note="Description of Artificial Sequence: Synthetic oligonucleotide"
gtgaagctccta

SEQ ID NO: 2552 - DNA, 12 bp, Artificial Sequence
  source: /note="Description of Artificial Sequence: Synthetic oligonucleotide"
taaaaggacctc

SEQ ID NO: 2553 - DNA, 40 bp, Homo sapiens; identical to SEQ ID NO: 2488

SEQ ID NO: 2554 - DNA, 33 bp, Artificial Sequence
  source: /note="Description of Artificial Sequence: Synthetic oligonucleotide"
aaaaacccaaaatattttactcagactgttact

SEQ ID NO: 2555 - DNA, 29 bp, Artificial Sequence
  source: /note="Description of Artificial Sequence: Synthetic oligonucleotide"
aaaaacccaaaatattttagctcctaact

SEQ ID NO: 2556 - DNA, 30 bp, Artificial Sequence
  source: /note="Description of Artificial Sequence: Synthetic oligonucleotide"
aaaaacccaaaatattttcagactgttact

SEQ ID NO: 2557 - DNA, 36 bp, Artificial Sequence; identical to SEQ ID NO: 2491
  source: /note="Description of Artificial Sequence: Synthetic oligonucleotide"

SEQ ID NO: 2558 - DNA, 34 bp, Artificial Sequence
  source: /note="Description of Artificial Sequence: Synthetic oligonucleotide"
aaaaacccaaaatattttagctcagactgttact

SEQ ID NO: 2559 - DNA, 29 bp, Artificial Sequence
  source: /note="Description of Artificial Sequence: Synthetic oligonucleotide"
aaaaacccaaaatatttcagactgttact

SEQ ID NO: 2560 - DNA, 31 bp, Artificial Sequence
  source: /note="Description of Artificial Sequence: Synthetic oligonucleotide"
aaaaacccaaaatatttctcagactgttact

SEQ ID NO: 2561 - DNA, 29 bp, Artificial Sequence
  source: /note="Description of Artificial Sequence: Synthetic oligonucleotide"
aaaaacccaaaatattttagactgttact

SEQ ID NO: 2562 - DNA, 24 bp, Artificial Sequence
  source: /note="Description of Artificial Sequence: Synthetic oligonucleotide"
cagtggataaaggcaacaatgcag

SEQ ID NO: 2563 - DNA, 38 bp, Artificial Sequence
  source: /note="Description of Artificial Sequence: Synthetic oligonucleotide"
aattatggtaatccccacaggtcaagggtggagccagg

SEQ ID NO: 2564 - DNA, 27 bp, Artificial Sequence
  source: /note="Description of Artificial Sequence: Synthetic oligonucleotide"
aattatggtaatccccacagagccagg

SEQ ID NO: 2565 - DNA, 36 bp, Artificial Sequence
  source: /note="Description of Artificial Sequence: Synthetic oligonucleotide"
aattatggtaatccccacagcaagggtggagccagg

SEQ ID NO: 2566 - DNA, 35 bp, Artificial Sequence
  source: /note="Description of Artificial Sequence: Synthetic oligonucleotide"
aattatggtaatcacaggtcaagggtggagccagg

SEQ ID NO: 2567 - DNA, 25 bp, Artificial Sequence
  source: /note="Description of Artificial Sequence: Synthetic oligonucleotide"
aattatggtcaagggtggagccagg

SEQ ID NO: 2568 - DNA, 24 bp, Artificial Sequence
  source: /note="Description of Artificial Sequence: Synthetic oligonucleotide"
cagtggataaaggtcaagggtgga

SEQ ID NO: 2569 - DNA, 24 bp, Artificial Sequence
  source: /note="Description of Artificial Sequence: Synthetic oligonucleotide"
cagtggataaaggtttccagagct
